(19) United States
(12) Patent Application Publication
(10) Pub. No.: US 2024/0175031 A1
(43) Pub. Date: May 30, 2024

(54) TREATMENT OF MST1 RELATED DISEASES AND DISORDERS

(71) Applicant: Empirico Inc., San Diego, CA (US)

(72) Inventors: Omri GOTTESMAN, San Diego, CA (US); Shannon BRUSE, San Diego, CA (US); Paul BUSKE, Madison, WI (US); Brian CAJES, San Diego, CA (US); David JAKUBOSKY, San Diego, CA (US); Sarah KLEINSTEIN, San Diego, CA (US); David LEWIS, Madison, WI (US); David ROZEMA, Cross Plains, WI (US); John VEKICH, San Diego, CA (US)

(21) Appl. No.: 18/567,342

(22) PCT Filed: Jun. 14, 2022
(86) PCT No.: PCT/US2022/033344

§ 371 Date: Dec. 5, 2023

Related U.S. Application Data
(60) Provisional application No. 63/211,364, filed on Jun. 16, 2021.

(51) Int. Cl. C12N 15/113; A61P 11/00

(52) U.S. Cl. CPC C12N 15/1136; A61P 11/00; C12N 2310/11; C12N 2310/14; C12N 2310/315; C12N 2310/321; C12N 2310/322; C12N 2310/3231; C12N 2310/351

(57) ABSTRACT

Disclosed herein are compositions comprising an oligonucleotide that targets MST1. The oligonucleotide may include a small interfering RNA (siRNA) or an antisense oligonucleotide (ASO). Also provided herein are methods of treating conditions associated with MST1 mutations that include providing an oligonucleotide that targets MST1 to a subject.

### CROSS-REFERENCE

[0001] This application claims the benefit of U.S. Provisional Application No. 63/211,364, filed Jun. 16, 2021, which application is incorporated herein by reference.

### BACKGROUND

[0002] Lung disorders are a common problem, and may affect a wide variety of persons. Improved therapeutics are needed for treating these disorders.

### SUMMARY

[0003] Disclosed herein, in some embodiments, are compositions comprising an oligonucleotide that targets MST1. Disclosed herein, in some embodiments, are compositions comprising an oligonucleotide that targets MST1 and when administered to a subject in an effective amount increases a lung function measurement. In some embodiments, the lung function measurement comprises a forced expiratory volume in 1 second (FEV1) measurement, a forced expiratory volume in 1 second percent predicted (FEV1pp) measurement, a forced vital capacity (FVC) measurement, a FEV1/FVC ratio measurement a forced expiratory volume, or a peak expiratory flow measurement. In some embodiments, the lung function measurement is increased by about 10% or more, as compared to prior to administration. Disclosed herein, in some embodiments, are compositions comprising an oligonucleotide that targets MST1 and when administered to a subject in an effective amount decreases a leukocyte measurement. In some embodiments, the leukocyte measurement comprises a lung leukocyte measurement. In some embodiments, the leukocyte measurement comprises a circulating leukocyte measurement. In some embodiments, the leukocyte measurement comprises a neutrophil measurement, eosinophil measurement, basophil measurement, monocyte measurement, or lymphocyte measurement, or a combination thereof. In some embodiments, the leukocyte measurement is decreased by about 10% or more, as compared to prior to administration. Disclosed herein, in some embodiments, are compositions comprising an oligonucleotide that targets MST1 and when administered to a subject in an effective amount decreases a chronic obstructive pulmonary disease (COPD) or asthma exacerbation measurement. In some embodiments, the COPD or asthma exacerbation measurement is decreased by about 10% or more, as compared to prior to administration. In some embodiments, the oligonucleotide comprises a modified internucleoside linkage. In some embodiments, the modified internucleoside linkage comprises alkylphosphonate, phosphorothioate, methylphosphonate, phosphorodithioate, alkylphosphonothioate, phosphoramidate, carbamate, carbonate, phosphate triester, acetamidate, or carboxymethyl ester, or a combination thereof. In some embodiments, the modified internucleoside linkage comprises one or more phosphorothioate linkages. In some embodiments, the oligonucleotide comprises 1, 2, 3, 4, 5, 6, 7, 8, 9, 10, 11, 12, 13, 14, 15, 16, 17, 18, 19, or 20 modified internucleoside linkages. In some embodiments, the oligonucleotide comprises a modified nucleoside. In some embodiments, the modified nucleoside comprises a locked nucleic acid (LNA), hexitol nucleic acid (HLA), cyclohexene nucleic acid (CeNA), 2′-methoxyethyl, 2′-O-alkyl, 2′-O-allyl, 2′-O-allyl, 2′-fluoro, or 2′-deoxy, or a combination thereof. In some embodiments, the modified nucleoside comprises a LNA. In some embodiments, the modified nucleoside comprises a 2′,4′ constrained ethyl nucleic acid. In some embodiments, the modified nucleoside comprises a 2′-O-methyl nucleoside, 2′-deoxyfluoro nucleoside, 2′-O—N-methylacetamido (2′-O-NMA) nucleoside, a 2′-O-dimethylaminoethoxyethyl (2′-O-DMAEOE) nucleoside, 2′-O-aminopropyl (2′-O-AP) nucleoside, or 2′-ara-F, or a combination thereof. In some embodiments, the modified nucleoside comprises one or more 2′fluoro modified nucleosides. In some embodiments, the modified nucleoside comprises a 2′ O-alkyl modified nucleoside. In some embodiments, the oligonucleotide comprises 1, 2, 3, 4, 5, 6, 7, 8, 9, 10, 11, 12, 13, 14, 15, 16, 17, 18, 19, 20, or 21 modified nucleosides. In some embodiments, the oligonucleotide comprises a lipid attached at a 3′ or 5′ terminus of the oligonucleotide. In some embodiments, the lipid comprises cholesterol, myristoyl, palmitoyl, stearoyl, lithocholoyl, docosanoyl, docosahexaenoyl, myristyl, palmityl stearyl, or α-tocopherol, or a combination thereof. In some embodiments, the oligonucleotide comprises a sugar moiety attached at a 3′ or 5′ terminus of the oligonucleotide. In some embodiments, the sugar comprises N-acetylgalactosamine (GalNAc), N-acetylglucosamine (GlcNAc), or mannose. In some embodiments, the oligonucleotide comprises an integrin targeting ligand attached at a 3′ or 5′ terminus of the oligonucleotide. In some embodiments, the integrin comprises integrin alpha-v-beta-6. In some embodiments, the integrin targeting ligand comprises an arginine-glycine-aspartic acid (RGD) peptide. In some embodiments, the oligonucleotide comprises a small interfering RNA (siRNA) comprising a sense strand and an antisense strand. In some embodiments, the sense strand is 12-30 nucleosides in length. In some embodiments, the antisense strand is 12-30 nucleosides in length. Disclosed herein, in some embodiments, are compositions comprising an oligonucleotide that inhibits the expression of MST1, wherein the oligonucleotide comprises an siRNA comprising a sense strand and an antisense strand, each strand is independently about 12-30 nucleosides in length, and at least one of the sense strand and the antisense strand comprises a nucleoside sequence comprising about 12-30 contiguous nucleosides of SEQ ID NO: 6185. In some embodiments, any one of the following is true with regard to the sense strand: (i) all purines comprise 2′ fluoro modified purines, and all pyrimidines comprise a mixture of 2′ fluoro and 2′ methyl modified pyrimidines; (ii) all purines comprise 2′ methyl modified purines, and all pyrimidines comprise a mixture of 2′ fluoro and 2′ methyl modified pyrimidines; (iii) all purines comprise 2′ fluoro modified purines, and all pyrimidines comprise 2′ methyl modified pyrimidines; (iv) all pyrimidines comprise 2′ fluoro modified pyrimidines, and all purines comprise a mixture of 2′ fluoro and 2′ methyl modified purines; (v) all pyrimidines comprise 2′ methyl modified pyrimidines, and all purines comprise a mixture of 2′ fluoro and 2′ methyl modified purines; or (vi) all pyrimidines comprise 2′ fluoro modified pyrimidines, and all purines comprise 2′ methyl modified purines. In some embodiments, the sense strand comprises any one of modification patterns 1S, 2S, 3S, 4S, 5S, 6S, 7S, 8S, 9S, 10S, 11S, 12S, 13S, 14S, 15S, 165, 175, 18S, 19S, 20S, 21S, 22S, 23S, 24S, 25S, 26S, 275, 285, 295, 30S, 31S, 32S, 33S, 24S, or 35S. In some embodiments, any one of the following is true with regard to the antisense strand: (i) all purines comprise 2′ fluoro modified purines, and all pyrimidines comprise a mixture of 2′ fluoro and 2′ methyl modified pyrimidines; (ii) all purines comprise 2′ methyl modified purines, and all pyrimidines comprise a mixture of 2′ fluoro and 2′ methyl modified pyrimidines; (iii) all purines comprise 2′ methyl modified purines, and all pyrimidines comprise 2′ fluoro modified pyrimidines; (iv) all pyrimidines comprise 2′ fluoro modified pyrimidines, and all purines comprise a mixture of 2′ fluoro and 2′ methyl modified purines; (v) all pyrimidines comprise 2′ methyl modified pyrimidines, and all purines comprise a mixture of 2′ fluoro and 2′ methyl modified purines; or (vi) all pyrimidines comprise 2′ methyl modified pyrimidines, and all purines comprise 2′ fluoro modified purines. In some embodiments, the antisense strand comprises any one of modification patterns 1AS, 2AS, 3AS, 4AS, 5AS, 6AS, 7AS, 8AS, 9AS, 10AS, 11AS, 12AS, 13AS, 14AS, 15AS, 16AS, 17AS, 19AS, 20AS, or 21AS. In some embodiments, the sense strand comprises the nucleic acid sequence of any one of SEQ ID NOs: 1-3024 or 6358-6397, and the antisense strand comprises the nucleic acid sequence of any one of SEQ ID NOs: 3025-6048 or 6398-6417. In some embodiments, the sense strand comprises the nucleic acid sequence of any one of SEQ ID NOs 6373, 6375, 6385, 6386, or 6387, and the antisense strand comprises the nucleic acid sequence of any one of SEQ ID NOs: 6403, 6405, 6415, 6416, or 6417. In some embodiments, the oligonucleotide comprises an antisense oligonucleotide (ASO). In some embodiments, the ASO is 12-30 nucleosides in length. Disclosed herein, in some embodiments, are compositions comprising an oligonucleotide that inhibits the expression of MST1, wherein the oligonucleotide comprises an ASO about 12-30 nucleosides in length and a nucleoside sequence complementary to about 12-30 contiguous nucleosides of SEQ ID NO: 6185. Some embodiments include a pharmaceutically acceptable carrier. Some embodiments include a method of treating a subject having a lung disorder, comprising administering an effective amount of the composition to the subject. In some embodiments, the lung disorder comprises COPD, acute exacerbation of COPD, emphysema, chronic bronchitis, asthma, status asthmaticus, asthma-COPD overlap syndrome (ACOS), cough, lung cancer, interstitial lung disease, or pulmonary fibrosis.

### BRIEF DESCRIPTION OF THE DRAWINGS

[0004] The novel features of the invention are set forth with particularity in the appended claims. A better understanding of the features and advantages of the present invention will be obtained by reference to the following detailed description that sets forth illustrative embodiments, in which the principles of the invention are utilized, and the accompanying drawings of which:

[0005] FIG. 1 shows a western blot for MST1 protein.

### DETAILED DESCRIPTION

[0006] Large-scale human genetic data can improve the success rate of pharmaceutical discovery and development. A Genome Wide Association Study (GWAS) may detect associations between genetic variants and traits in a population sample. A GWAS may enable better understanding of the biology of disease, and provide applicable treatments. A GWAS can utilize genotyping and/or sequencing data, and often involves an evaluation of millions of genetic variants that are relatively evenly distributed across the genome. The most common GWAS design is the case-control study, which involves comparing variant frequencies in cases versus controls. If a variant has a significantly different frequency in cases versus controls, that variant is said to be associated with disease. Association statistics that may be used in a GWAS are p-values, as a measure of statistical significance; odds ratios (OR), as a measure of effect size; or beta coefficients (beta), as a measure of effect size. Researchers often assume an additive genetic model and calculate an allelic odds ratio, which is the increased (or decreased) risk of disease conferred by each additional copy of an allele (compared to carrying no copies of that allele). An additional concept in design and interpretation of GWAS is that of linkage disequilibrium, which is the non-random association of alleles. The presence of linkage disequilibrium can obfuscate which variant is “causal.”

[0007] Functional annotation of variants and/or wet lab experimentation can identify the causal genetic variant identified via GWAS, and in many cases may lead to the identification of disease-causing genes. In particular, understanding the functional effect of a causal genetic variant (for example, loss of protein function, gain of protein function, increase in gene expression, or decrease in gene expression) may allow that variant to be used as a proxy for therapeutic modulation of the target gene, or to gain insight into potential therapeutic efficacy and safety of a therapeutic that modulates that target.

[0008] Identification of such gene-disease associations has provided insights into disease biology and may be used to identify novel therapeutic targets for the pharmaceutical industry. In order to translate the therapeutic insights derived from human genetics, disease biology in patients may be exogenously ‘programmed’ into replicating the observation from human genetics. There are several potential options for therapeutic modalities that may be brought to bear in translating therapeutic targets identified via human genetics into novel medicines. These may include well established therapeutic modalities such as small molecules and monoclonal antibodies, maturing modalities such as oligonucleotides, and emerging modalities such as gene therapy and gene editing. The choice of therapeutic modality can depend on several factors including the location of a target (for example, intracellular, extracellular, or secreted), a relevant tissue (for example, lung or liver) and a relevant indication.

[0009] The MST1 (macrophage-stimulating 1) gene is located on chromosome 3, and encodes macrophage-stimulating protein (MSP), also known as hepatocyte growth factor-like protein (HLP, HGFL, or HGFLP). MSP may also be referred to as an MST1 protein. The MST1 gene may encode various transcripts or splice variants. MSP may include 711 amino acids and have amass of about 80.3 kDa. MSP may be cleaved into an alpha and beta chain. MSP may be cytoplasmic. MSP may be secreted. MSP may interact with the macrophage-stimulating protein receptor, encoded by MST1R (macrophage-stimulating 1 receptor). MST1 may be expressed in liver cells such as hepatocytes. Secreted MSP may bind or interact with macrophage-stimulating protein receptor in the lungs. MSP may stimulate lung ciliary motility. MST1 may be expressed in lung cells. An example of an MSP amino acid sequence, and further description of MSP is included at uniprot.org under accession no. P26927 (last modified May 15, 2007).

[0010] Here, it is shown that genetic variants that may result in loss of function of the MST1 gene in humans are associated with decreased risk of chronic obstructive pulmonary disease (COPD), family history of COPD, asthma, and use of inhaled beta agonist medication. Therefore, inhibition of MST1 or MSP may serve as a therapeutic strategy for treatment of a lung disorder such as COPD, acute exacerbation of COPD, emphysema, chronic bronchitis, asthma, status asthmaticus, asthma-COPD overlap syndrome (ACOS), cough, lung cancer, interstitial lung disease, or pulmonary fibrosis.

[0011] Disclosed herein, are methods or compositions that inhibit or target MST1 or MSP. Where inhibition or targeting of MST1 is disclosed, it is contemplated that some embodiments may include inhibiting or targeting MSP, or vice versa. For example, by inhibiting or targeting an RNA (e.g. mRNA) encoded by the MST1 gene using an oligonucleotide described herein, MSP may be inhibited or targeted as a result of there being less production of MSP by translation of the MST1 RNA; or MSP may be targeted or inhibited by an oligonucleotide that binds or interacts with an MST1 RNA and reduces production of MSP from the MST1 RNA. Thus, targeting MST1 may refer to binding an MST1 RNA and reducing MST1 RNA levels or MSP levels. The oligonucleotide may include a small interfering RNA (siRNA) or an antisense oligonucleotide (ASO). Also provided herein are methods of treating a lung disorder by providing an oligonucleotide that targets MST1 to a subject in need thereof.

### I. COMPOSITIONS

[0012] Disclosed herein, in some embodiments, are compositions comprising an oligonucleotide. In some embodiments, the composition comprises an oligonucleotide that targets MST1. In some embodiments, the composition consists of an oligonucleotide that targets MST1. In some embodiments, the oligonucleotide reduces MST1 mRNA expression in the subject. In some embodiments, the oligonucleotide reduces MSP expression in the subject. The oligonucleotide may include a small interfering RNA (siRNA) described herein. The oligonucleotide may include an antisense oligonucleotide (ASO) described herein. In some embodiments, a composition described herein is used in a method of treating a disorder in a subject in need thereof some embodiments relate to a composition comprising an oligonucleotide for use in a method of treating a disorder as described herein. Some embodiments relate to use of a composition comprising an oligonucleotide, in a method of treating a disorder as described herein.

[0013] Some embodiments include a composition comprising an oligonucleotide that targets MST1 and when administered to a subject in an effective amount decreases MST1 mRNA or MSP levels in a cell, fluid or tissue. In some embodiments, the composition comprises an oligonucleotide that targets MST1 and when administered to a subject in an effective amount decreases MST1 mRNA levels in a cell or tissue. In some embodiments, the cell is a liver cell or hepatocyte. In some embodiments, the cell is a lung cell, lung epithelial cell, type I or II alveolar cell, macrophage, alveolar macrophage, goblet cell, club cell, or fibroblast. In some embodiments, the tissue is liver tissue. In some embodiments, the tissue is lung tissue. In some embodiments, the MST1 mRNA levels are decreased by about 2.5% or more, about 5% or more, or about 7.5% or more, as compared to prior to administration. In some embodiments, the MST1 mRNA levels are decreased by about 10% or more, as compared to prior to administration. In some embodiments, the MST1 mRNA levels are decreased by about 20% or more, about 30% or more, about 40% or more, about 50% or more, about 60% or more, about 70% or more, about 80% or more, about 90% or more, or about 100%, as compared to prior to administration. In some embodiments, the MST1 mRNA levels are decreased by no more than about 2.5%, no more than about 5%, or no more than about 7.5%, as compared to prior to administration. In some embodiments, the MST1 mRNA levels are decreased by no more than about 10%, as compared to prior to administration. In some embodiments, the MST1 mRNA levels are decreased by no more than about 20%, no more than about 30%, no more than about 40%, no more than about 50%, no more than about 60%, no more than about 70%, no more than about 80%, or no more than about 90%, as compared to prior to administration. In some embodiments, the MST1 mRNA levels are decreased by 2.5%, 5%, 7.5%, 10%, 15%, 20%, 25%, 30%, 35%, 40%, 45%, 50%, 55%, 60%, 65%, 70%, 75%, 80%, 85%, 90%, 95%, or 100%, or by a range defined by any of the two aforementioned percentages.

[0014] In some embodiments, the composition comprises an oligonucleotide that targets MST1 and when administered to a subject in an effective amount decreases MSP levels in a cell, fluid or tissue. In some embodiments, the cell is a liver cell or hepatocyte. In some embodiments, the cell is a lung cell, lung epithelial cell, type I or II alveolar cell, macrophage, alveolar macrophage, goblet cell, club cell, or fibroblast. In some embodiments, the tissue is liver tissue. In some embodiments, the tissue is lung tissue. In some embodiments, the fluid is a blood, serum, or plasma sample. In some embodiments, the fluid is a lung fluid such as a bronchoalveolar fluid. In some embodiments, the MSP levels are decreased by about 2.5% or more, about 5% or more, or about 7.5% or more, as compared to prior to administration. In some embodiments, the MSP levels are decreased by about 10% or more, as compared to prior to administration. In some embodiments, the MSP levels are decreased by about 20% or more, about 30% or more, about 40% or more, about 50% or more, about 60% or more, about 70% or more, about 80% or more, about 90% or more, or about 100%, as compared to prior to administration. In some embodiments, the MSP levels are decreased by no more than about 2.5%, no more than about 5%, or no more than about 7.5%, as compared to prior to administration. In some embodiments, the MSP levels are decreased by no more than about 10%, as compared to prior to administration. In some embodiments, the MSP levels are decreased by no more than about 20%, no more than about 30%, no more than about 40%, no more than about 50%, no more than about 60%, no more than about 70%, no more than about 80%, or no more than about 90%, as compared to prior to administration. In some embodiments, the MSP levels are decreased by 2.5%, 5%, 7.5%, 10%, 15%, 20%, 25%, 30%, 35%, 40%, 45%, 50%, 55%, 60%, 65%, 70%, 75%, 80%, 85%, 90%, 95%, or 100%, or by a range defined by any of the two aforementioned percentages.

[0015] In some embodiments, the composition comprises an oligonucleotide that targets MST1 and when administered to a subject in an effective amount diminishes an adverse phenotype of lung disorder in the subject. The lung disorder may include chronic obstructive pulmonary disease (COPD), acute exacerbation of COPD, emphysema, chronic bronchitis, asthma, status asthmaticus, asthma-COPD overlap syndrome (ACOS), cough, lung cancer, interstitial lung disease, or pulmonary fibrosis. In some embodiments, the adverse phenotype is decreased by about 2.5% or more, about 5% or more, or about 7.5% or more, as compared to prior to administration. In some embodiments, the adverse phenotype is decreased by about 10% or more, as compared to prior to administration. In some embodiments, the adverse phenotype is decreased by about 20% or more, about 30% or more, about 40% or more, about 50% or more, about 60% or more, about 70% or more, about 80% or more, about 90% or more, or about 100%, as compared to prior to administration. In some embodiments, the adverse phenotype is decreased by no more than about 2.5%, no more than about 5%, or no more than about 7.5%, as compared to prior to administration. In some embodiments, the adverse phenotype is decreased by no more than about 10%, as compared to prior to administration. In some embodiments, the adverse phenotype is decreased by no more than about 20%, no more than about 30%, no more than about 40%, no more than about 50%, no more than about 60%, no more than about 70%, no more than about 80%, or no more than about 90%, as compared to prior to administration. In some embodiments, the adverse phenotype is decreased by 2.5%, 5%, 7.5%, 10%, 15%, 20%, 2%, 30%, 35%, 40%, 45%, 50%, 55%, 60%, 65%, 70%, 75%, 80%, 85%, 90%, 95%, or 100%, or by a range defined by any of the two aforementioned percentages.

[0016] In some embodiments, the composition comprises an oligonucleotide that targets MST1 and when administered to a subject in an effective amount enhances a protective phenotype of a lung disorder. The lung disorder may include chronic obstructive pulmonary disease (COPD), acute exacerbation of COPD, emphysema, chronic bronchitis, asthma, status asthmaticus, asthma-COPD overlap syndrome (ACOS), cough, lung cancer, interstitial lung disease, or pulmonary fibrosis. In some embodiments, the protective phenotype is increased by about 2.5% or more, about 5% or more, or about 7.5% or more, as compared to prior to administration. In some embodiments, the protective phenotype is increased by about 10% or more, as compared to prior to administration. In some embodiments, the protective phenotype is increased by about 20% or more, about 30% or more, about 40% or more, about 50% or more, about 60% or more, about 70% or more, about 80% or more, about 90% or more, or about 100% or more, as compared to prior to administration. In some embodiments, the protective phenotype is increased by about 200% or more, about 300% or more, about 400% or more, about 500% or more, about 600% or more, about 700% or more, about 800% or more, about 900% or more, or about 1000% or more, as compared to prior to administration. In some embodiments, the protective phenotype is increased by no more than about 2.5%, no more than about 5%, or no more than about 7.5%, as compared to prior to administration. In some embodiments, the protective phenotype is increased by no more than about 10%, as compared to prior to administration. In some embodiments, the protective phenotype is increased by no more than about 20%, no more than about 30%, no more than about 40%, no more than about 50%, no more than about 60%, no more than about 70%, no more than about 80%, no more than about 90%, or no more than about 100%, as compared to prior to administration. In some embodiments, the protective phenotype is increased by no more than about 200%, no more than about 300%, no more than about 400%, no more than about 500%, no more than about 600%, no more than about 700%, no more than about 800%, no more than about 900%, or no more than about 1000%, as compared to prior to administration. In some embodiments, the protective phenotype is increased by 2.5%, 5%, 7.5%, 10%, 15%, 20%, 25%, 30%, 35%, 40%, 45%, 50%, 55%, 60%, 65%, 70%, 75%, 80%, 85%, 90%, 95%, 100%, 150%, 200%, 250%, 300%, 400%, 500%, 600%, 700%, 800%, 900%, or 1000%, or by a range defined by any of the two aforementioned percentages.

[0017] In some embodiments, the composition comprises an oligonucleotide that targets MST1 and when administered to a subject in an effective amount improves (e.g. increases) a lung function measurement. The lung function measurement may include a measurement of forced expiratory volume in 1 second (FEV1), forced expiratory volume in 1 second percent predicted (FEV1pp), forced vital capacity (FVC), FEV1/FVC ratio, forced expiratory volume, or peak expiratory flow. In some embodiments, the lung function measurement is improved by about 2.5% or more, about 5% or more, or about 7.5% or more, as compared to prior to administration. In some embodiments, the lung function measurement is improved by about 10% or more, as compared to prior to administration. In some embodiments, the lung function measurement is improved by about 20% or more, about 30% or more, about 40% or more, about 50% or more, about 60% or more, about 70% or more, about 80% or more, about 90% or more, or about 100% or more, as compared to prior to administration. In some embodiments, the lung function measurement is improved by about 200% or more, about 300% or more, about 400% or more, about 500% or more, about 600% or more, about 700% or more, about 800% or more, about 900% or more, or about 1000% or more, as compared to prior to administration. In some embodiments, the lung function measurement is improved by no more than about 2.5%, no more than about 5%, or no more than about 7.5%, as compared to prior to administration. In some embodiments, the lung function measurement is improved by no more than about 10%, as compared to prior to administration. In some embodiments, the lung function measurement is improved by no more than about 20%, no more than about 30%, no more than about 40%, no more than about 50%, no more than about 60%, no more than about 70%, no more than about 80%, no more than about 90%, or no more than about 100%, as compared to prior to administration. In some embodiments, the lung function measurement is improved by no more than about 200%, no more than about 300%, no more than about 400%, no more than about 500%, no more than about 600%, no more than about 700%, no more than about 800%, no more than about 900%, or no more than about 1000%, as compared to prior to administration. In some embodiments, the lung function measurement is improved by 2.5%, 5%, 7.5%, 10%, 15%, 20%, 25%, 30%, 35%, 40%, 45%, 50%, 55%, 60%, 65%, 70%, 75%, 80%, 85%, 90%, 95%, 100%, 150%, 200%, 250%, 300%, 400%, 500%, 600%, 700%, 800%, 900%, or 1000%, or by a range defined by any of the two aforementioned percentages.

[0018] A leukocyte measurement may be affected by a lung disorder. For example, some inflammatory lung disorders that may include chronic obstructive pulmonary disease (COPD) or asthma may lead to increased inflammation and circulating white blood cell counts that may be treated using a composition comprising an oligonucleotide; or lung inflammation concomitant with a lung disorder may include an increase in leukocytes in a lung tissue or lung fluid (e.g. bronchoalveolar fluid). In some embodiments, the composition comprises an oligonucleotide that targets MST1 and when administered to a subject in an effective amount changes a leukocyte measurement in a cell, fluid or tissue of the subject. In some embodiments, the cell is a liver cell or hepatocyte. In some embodiments, the cell is a lung cell, lung epithelial cell, type I or II alveolar cell, macrophage, alveolar macrophage, goblet cell, club cell, or fibroblast. In some embodiments, the tissue is liver tissue. In some embodiments, the tissue is lung tissue. In some embodiments, the fluid is a blood, serum, or plasma sample. In some embodiments, the fluid is a lung fluid such as a bronchoalveolar fluid. The change may be a decrease (for example, when circulating levels of leukocytes, or levels of leukocytes in lungs are increased due to an inflammatory lung disorder). The change may be an increase in some embodiments. In some embodiments, the leukocyte measurement is changed by about 2.5% or more, about 5% or more, or about 7.5% or more, as compared to prior to administration. In some embodiments, the leukocyte measurement is changed by about 10% or more, as compared to prior to administration. In some embodiments, the leukocyte measurement is changed by about 20% or more, about 30% or more, about 40% or more, about 50% or more, about 60% or more, about 70% or more, or about 80% or more, as compared to prior to administration. In some embodiments, the leukocyte measurement is changed by no more than about 2.5%, no more than about 5%, or no more than about 7.5%, as compared to prior to administration. In some embodiments, the leukocyte measurement is changed by no more than about 10%, as compared to prior to administration. In some embodiments, the leukocyte measurement is changed by no more than about 20%, no more than about 30%, no more than about 40%, no more than about 50%, no more than about 60%, no more than about 70%, no more than about 80%, or no more than about 90%, as compared to prior to administration. In some embodiments, the leukocyte measurement is changed by 2.5%, 5%, 7.5%, 10%, 15%, 20%, 25%, 30%, 35%, 40%, 45%, 50%, 55% 60%, 65%, 70%, 75%, 80%, 85%, or 90%, or by a range defined by any of the two aforementioned percentages.

[0019] In some embodiments, the composition comprises an oligonucleotide that targets MST1 and when administered to a subject in an effective amount decreases chronic obstructive pulmonary disease (COPD) exacerbations in the subject. In some embodiments, the COPD exacerbations are decreased by about 2.5% or more, about 5% or more, or about 7.5% or more, as compared to prior to administration. In some embodiments, the COPD exacerbations are decreased by about 10% or more, as compared to prior to administration. In some embodiments, the COPD exacerbations are decreased by about 20% or more, about 30% or more, about 40% or more, about 50% or more, about 60% or more, about 70% or more, about 80% or more, about 90% or more, or about 100%, as compared to prior to administration. In some embodiments, the COPD exacerbations are decreased by no more than about 2.5%, no more than about 5%, or no more than about 7.5%, as compared to prior to administration. In some embodiments, the COPD exacerbations are decreased by no more than about 10%, as compared to prior to administration. In some embodiments, the COPD exacerbations are decreased by no more than about 20%, no more than about 30%, no more than about 40%, no more than about 50%, no more than about 60%, no more than about 70%, no more than about 80%, or no more than about 90%, as compared to prior to administration. In some embodiments, the COPD exacerbations are decreased by 2.5%, 5%, 7.5%, 10%, 15%, 20%, 25%, 30%, 35%, 40%, 45%, 50%, 55%, 60%, 65%, 70%, 75%, 80%, 85%, 90%, 95%, or 100%, or by a range defined by any of the two aforementioned percentages.

[0020] In some embodiments, the composition comprises an oligonucleotide that targets MST1 and when administered to a subject in an effective amount decreases asthma exacerbations in the subject. In some embodiments, the asthma exacerbations are decreased by about 2.5% or more, about 5% or more, or about 7.5% or more, as compared to prior to administration. In some embodiments, the asthma exacerbations are decreased by about 10% or more, as compared to prior to administration. In some embodiments, the asthma exacerbations are decreased by about 20% or more, about 30% or more, about 40% or more, about 50% or more, about 60% or more, about 70% or more, about 80% or more, about 90% or more, or about 100%, as compared to prior to administration. In some embodiments, the asthma exacerbations are decreased by no more than about 2.5%, no more than about 5%, or no more than about 7.5%, as compared to prior to administration. In some embodiments, the asthma exacerbations are decreased by no more than about 10%, as compared to prior to administration. In some embodiments, the asthma exacerbations are decreased by no more than about 20%, no more than about 30%, no more than about 40%, no more than about 50%, no more than about 60%, no more than about 70%, no more than about 80%, or no more than about 90%, as compared to prior to administration. In some embodiments, the asthma exacerbations are decreased by 2.5%, 5%, 7.5%, 10%, 15%, 20%, 25%, 30%, 35%, 40%, 45%, 50%, 55%, 60%, 65%, 70%, 75%, 80%, 85%, 90%, 95%, or 100%, or by a range defined by any of the two aforementioned percentages.

[0021] A. siRNAs

[0022] In some embodiments, the composition comprises an oligonucleotide that targets MST1, wherein the oligonucleotide comprises a small interfering RNA (siRNA). In some embodiments, the composition comprises an oligonucleotide that targets MST1, wherein the oligonucleotide comprises a small interfering RNA (siRNA) comprising a sense strand and an antisense strand.

[0023] In some embodiments, the composition comprises an oligonucleotide that inhibits the expression of MST1, wherein the oligonucleotide comprises an siRNA comprising a sense strand and an antisense strand, wherein the sense strand is 12-30 nucleosides in length. In some embodiments, the composition comprises a sense strange that is 10, 11, 12, 13, 14, 15, 16, 17, 18, 19, 20, 21, 22, 23, 24, 25, 26, 27, 28, 29, or 30 nucleosides in length, or a range defined by any of the two aforementioned numbers. The sense strand may be 14-30 nucleosides in length. In some embodiments, the composition comprises an antisense strand is 12-30 nucleosides in length. In some embodiments, the composition comprises an antisense strand that is 10, 11, 12, 13, 14, 15, 16, 17, 18, 19, 20, 21, 22, 23, 24, 25, 26, 27, 28, 29, or 30 nucleosides in length, or a range defined by any of the two aforementioned numbers. The antisense strand may be 14-30 nucleosides in length.

[0024] In some embodiments, the composition comprises an oligonucleotide that inhibits the expression of MST1, wherein the oligonucleotide comprises an siRNA comprising a sense strand and an antisense strand, each strand is independently about 12-30 nucleosides in length, and at least one of the sense strand and the antisense strand comprises a nucleoside sequence comprising about 12-30 contiguous nucleosides of a full-length human MST1 mRNA sequence such as SEQ ID NO: 6163. In some embodiments, at least one of the sense strand and the antisense strand comprise a nucleoside sequence comprising at least about 10, 11, 12, 13, 14, 15, 16, 17, 18, 19, 20, 21, 22, 23, 24, 25, 26, 27, 28, 29, 30, or more contiguous nucleosides of one of SEQ ID NO: 6163.

[0025] In some embodiments, the composition comprises an oligonucleotide that inhibits the expression of MST1, wherein the oligonucleotide comprises an siRNA comprising a sense strand and an antisense strand, each strand is independently about 12-30 nucleosides in length, and at least one of the sense strand and the antisense strand comprises a nucleoside sequence comprising about 12-30 contiguous nucleosides of a full-length human MST1 mRNA sequence such as SEQ ID NO: 6185. In some embodiments, at least one of the sense strand and the antisense strand comprise a nucleoside sequence comprising at least about 10, 11, 12, 13, 14, 15, 16, 17, 18, 19, 20, 21, 22, 23, 24, 25, 26, 27, 28, 29, 30, or more contiguous nucleosides of one of SEQ ID NO: 6185.

[0026] In some embodiments, the composition comprises an oligonucleotide that inhibits the expression of MST1, wherein the oligonucleotide comprises an siRNA comprising a sense strand and an antisense strand, wherein the sense strand and the antisense strand form a double-stranded RNA duplex. In some embodiments, the first base pair of the double-stranded RNA duplex is an AU base pair.

[0027] In some embodiments, the sense strand further comprises a 3′ overhang. In some embodiments, the 3′ overhang comprises 1, 2, 3, 4, 5, 6, 7, 8, 9, or 10 nucleosides, or a range of nucleotides defined by any two of the aforementioned numbers. In some embodiments, the 3′ overhang comprises 1, 2, or more nucleosides. In some embodiments, the 3′ overhang comprises 2 nucleosides. In some embodiments, the sense strand further comprises a 5′ overhang. In some embodiments, the 5′ overhang comprises 1, 2, 3, 4, 5, 6, 7, 8, 9, or 10 nucleosides, or a range of nucleotides defined by any two of the aforementioned numbers. In some embodiments, the 5′ overhang comprises 1, 2, or more nucleosides. In some embodiments, the 5′ overhang comprises 2 nucleosides.

[0028] In some embodiments, the antisense strand further comprises a 3′ overhang. In some embodiments, the 3′ overhang comprises 1, 2, 3, 4, 5, 6, 7, 8, 9, or 10 nucleosides, or a range of nucleotides defined by any two of the aforementioned numbers. In some embodiments, the 3′ overhang comprises 1, 2, or more nucleosides. In some embodiments, the 3′ overhang comprises 2 nucleosides. In some embodiments, the antisense strand further comprises a 5′ overhang. In some embodiments, the 5′ overhang comprises 1, 2, 3, 4, 5, 6, 7, 8, 9, or 10 nucleosides, or a range of nucleotides defined by any two of the aforementioned numbers. In some embodiments, the 5′ overhang comprises 1, 2, or more nucleosides. In some embodiments, the 5′ overhang comprises 2 nucleosides.

[0029] In some embodiments, the composition comprises an oligonucleotide that inhibits the expression of MST1, wherein the oligonucleotide comprises an siRNA comprising a sense strand and an antisense strand, wherein the siRNA binds with a 19mer in a human MST1 mRNA. In some embodiments, the siRNA binds with a 12mer, a 13mer, a 14mer, a 15mer, a 16mer, a 17mer, a 18mer, a 19mer, a 20mer, a 21mer, a 22mer, a 23mer, a 24mer, or a 25mer in a human MST1 mRNA.

[0030] In some embodiments, the composition comprises an oligonucleotide that inhibits the expression of MST1, wherein the oligonucleotide comprises an siRNA comprising a sense strand and an antisense strand, wherein the siRNA binds with a 17mer in a non-human primate MST1 mRNA. In some embodiments, the siRNA binds with a 12mer, a 13mer, a 14mer, a 15mer, a 16mer, a 17mer, a 18mer, a 19mer, a 20mer, a 21mer, a 22mer, a 23mer, a 24mer, or a 25mer in a non-human primate MST1 mRNA.

[0031] In some embodiments, the composition comprises an oligonucleotide that inhibits the expression of MST1, wherein the oligonucleotide comprises an siRNA comprising a sense strand and an antisense strand, wherein the siRNA binds with a human MST1 mRNA and less than or equal to 20 human off-targets, with no more than 2 mismatches in the antisense strand. In some embodiments, the siRNA binds with a human MST1 mRNA and less than or equal to 10 human off-targets, with no more than 2 mismatches in the antisense strand. In some embodiments, the siRNA binds with a human MST1 mRNA and less than or equal to 30 human off-targets, with no more than 2 mismatches in the antisense strand. In some embodiments, the siRNA binds with a human MST1 mRNA and less than or equal to 40 human off-targets, with no more than 2 mismatches in the antisense strand. In some embodiments, the siRNA binds with a human MST1 mRNA and less than or equal to 50 human off-targets, with no more than 2 mismatches in the antisense strand. In some embodiments, the siRNA binds with a human MST1 mRNA and less than or equal to 10 human off-targets, with no more than 3 mismatches in the antisense strand. In some embodiments, the siRNA binds with a human MST1 mRNA and less than or equal to 20 human off-targets, with no more than 3 mismatches in the antisense strand. In some embodiments, the siRNA binds with a human MST1 mRNA and less than or equal to 30 human off-targets, with no more than 3 mismatches in the antisense strand. In some embodiments, the siRNA binds with a human MST1 mRNA and less than or equal to 40 human off-targets, with no more than 3 mismatches in the antisense strand. In some embodiments, the siRNA binds with a human MST1 mRNA and less than or equal to 50 human off-targets, with no more than 3 mismatches in the antisense strand.

[0032] In some embodiments, the composition comprises an oligonucleotide that inhibits the expression of MST1, wherein the oligonucleotide comprises an siRNA comprising a sense strand and an antisense strand, siRNA binds with a human MST1 mRNA target site that does not harbor an SNP, with a minor allele frequency (MAF) greater or equal to 1% (pos. 2-18). In some embodiments, the MAF is greater or equal to about 2%, about 3%, about 4%, about 5%, about 6%, about 7%, about 8%, about 9%, about 10%, about 11%, about 12%, about 13%, about 14%, about 15%, about 16%, about 17%, about 18%, about 19%, or about 20%.

[0033] In some embodiments, the composition comprises an oligonucleotide that inhibits the expression of MST1, wherein the oligonucleotide comprises an siRNA comprising a sense strand and an antisense strand, wherein the sense strand comprises a nucleoside sequence comprising or consisting of the sequence of any one of SEQ ID NOs: 1-3024, or a nucleic acid sequence thereof having 1 or 2 nucleoside substitutions, additions, or deletions. In some embodiments, the sense strand comprises a nucleoside sequence comprising or consisting of the sequence of any one of SEQ ID NOs: 1-3024, or a nucleic acid sequence thereof having 3 or 4 nucleoside substitutions, additions, or deletions. In some embodiments, the sense strand further comprises a 3′ overhang. In some embodiments, the 3′ overhang comprises 1, 2, 3, 4, 5, 6, 7, 8, 9, or 10 nucleosides, or a range of nucleotides defined by any two of the aforementioned numbers. In some embodiments, the 3′ overhang comprises 1, 2, or more nucleosides. In some embodiments, the 3′ overhang comprises 2 nucleosides. In some embodiments, the sense strand further comprises a 5′ overhang. In some embodiments, the 5′ overhang comprises 1, 2, 3, 4, 5, 6, 7, 8, 9, or 10 nucleosides, or a range of nucleotides defined by any two of the aforementioned numbers. In some embodiments, the 5′ overhang comprises 1, 2, or more nucleosides. In some embodiments, the 5′ overhang comprises 2 nucleosides. In some embodiments, the sense strand comprises a nucleoside sequence comprising or consisting of the sequence of any one of SEQ ID NOs: 1-3024, or a nucleic acid sequence thereof having 1 or 2 nucleoside additions at the 3′ end. In some embodiments, the composition comprises an oligonucleotide that inhibits the expression of MST1, wherein the oligonucleotide comprises an siRNA comprising a sense strand and an antisense strand, wherein the sense strand comprises a nucleoside sequence comprising or consisting of the sequence of any one of SEQ ID NOs: 1-3024. The sense strand or antisense strand may comprise any modifications described herein. The sense strand or antisense strand may comprise a lipid moiety or a GalNAc moiety.

[0034] In some embodiments, the composition comprises an oligonucleotide that inhibits the expression of MST1, wherein the oligonucleotide comprises an siRNA comprising a sense strand and an antisense strand, wherein the antisense strand comprises a nucleoside sequence comprising or consisting of the sequence of any one of SEQ ID NOs: 3025-6048, or a nucleic acid sequence thereof having 1 or 2 nucleoside substitutions, additions, or deletions. In some embodiments, the antisense strand sequence comprises a nucleoside sequence comprising or consisting of the sequence of any one of SEQ ID NOs: 3025-6048, or a nucleic acid sequence thereof having 3 or 4 nucleoside substitutions, additions, or deletions. In some embodiments, the antisense strand further comprises a 3′ overhang. In some embodiments, the 3′ overhang comprises 1, 2, 3, 4, 5, 6, 7, 8, 9, or 10 nucleosides, or a range of nucleotides defined by any two of the aforementioned numbers. In some embodiments, the 3′ overhang comprises 1, 2, or more nucleosides. In some embodiments, the 3′ overhang comprises 2 nucleosides. In some embodiments, the antisense strand further comprises a 5′ overhang. In some embodiments, the 5′ overhang comprises 1, 2, 3, 4, 5, 6, 7, 8, 9, or 10 nucleosides, or a range of nucleotides defined by any two of the aforementioned numbers. In some embodiments, the 5′ overhang comprises 1, 2, or more nucleosides. In some embodiments, the 5′ overhang comprises 2 nucleosides. In some embodiments, the antisense strand comprises a nucleoside sequence comprising or consisting of the sequence of any one of SEQ ID NOs: 3025-6048, or a nucleic acid sequence thereof having 1 or 2 nucleoside additions at the 3′ end. In some embodiments, the composition comprises an oligonucleotide that inhibits the expression of MST1, wherein the oligonucleotide comprises an siRNA comprising a sense strand and an antisense strand, wherein the antisense strand comprises a nucleoside sequence comprising or consisting of the sequence of any one of SEQ ID NOs: 3025-6048. The sense strand or antisense strand may comprise any modifications described herein. The sense strand or antisense strand may comprise a lipid moiety or a GalNAc moiety.

[0035] In some embodiments, the composition comprises an oligonucleotide that inhibits the expression of MST1, wherein the oligonucleotide comprises an siRNA comprising a sense strand and an antisense strand, wherein the sense strand comprises a nucleoside sequence comprising or consisting of the sequence of any one of SEQ ID NOs: 6358-6397, or a nucleic acid sequence thereof having 1 or 2 nucleoside substitutions, additions, or deletions. In some embodiments, the sense strand comprises a nucleoside sequence comprising or consisting of the sequence of any one of SEQ ID NOs: 6358-6397, or a nucleic acid sequence thereof having 3 or 4 nucleoside substitutions, additions, or deletions. In some embodiments, the sense strand further comprises a 3′ overhang. In some embodiments, the 3′ overhang comprises 1, 2, 3, 4, 5, 6, 7, 8, 9, or 10 nucleosides, or a range of nucleotides defined by any two of the aforementioned numbers. In some embodiments, the 3′ overhang comprises 1, 2, or more nucleosides. In some embodiments, the 3′ overhang comprises 2 nucleosides. In some embodiments, the sense strand further comprises a 5′ overhang. In some embodiments, the 5′ overhang comprises 1, 2, 3, 4, 5, 6, 7, 8, 9, or 10 nucleosides, or a range of nucleotides defined by any two of the aforementioned numbers. In some embodiments, the 5′ overhang comprises 1, 2, or more nucleosides. In some embodiments, the 5′ overhang comprises 2 nucleosides. In some embodiments, the sense strand comprises a nucleoside sequence comprising or consisting of the sequence of any one of SEQ ID NOs: 6358-6397, or a nucleic acid sequence thereof having 1 or 2 nucleoside additions at the 3′ end. In some embodiments, the composition comprises an oligonucleotide that inhibits the expression of MST1, wherein the oligonucleotide comprises an siRNA comprising a sense strand and an antisense strand, wherein the sense strand comprises a nucleoside sequence comprising or consisting of the sequence of any one of SEQ ID NOs: 6358-6397. The sense strand or antisense strand may comprise any modifications described herein. The sense strand or antisense strand may comprise a lipid moiety or a GalNAc moiety.

[0036] In some embodiments, the composition comprises an oligonucleotide that inhibits the expression of MST1, wherein the oligonucleotide comprises an siRNA comprising a sense strand and an antisense strand, wherein the antisense strand comprises a nucleoside sequence comprising or consisting of the sequence of any one of SEQ ID NOs: 6398-6417, or a nucleic acid sequence thereof having 1 or 2 nucleoside substitutions, additions, or deletions. In some embodiments, the antisense strand sequence comprises a nucleoside sequence comprising or consisting of the sequence of any one of SEQ ID NOs: 6398-6417, or a nucleic acid sequence thereof having 3 or 4 nucleoside substitutions, additions, or deletions. In some embodiments, the antisense strand further comprises a 3′ overhang. In some embodiments, the 3′ overhang comprises 1, 2, 3, 4, 5, 6, 7, 8, 9, or 10 nucleosides, or a range of nucleotides defined by any two of the aforementioned numbers. In some embodiments, the 3′ overhang comprises 1, 2, or more nucleosides. In some embodiments, the 3′ overhang comprises 2 nucleosides. In some embodiments, the antisense strand further comprises a 5′ overhang. In some embodiments, the 5′ overhang comprises 1, 2, 3, 4, 5, 6, 7, 8, 9, or 10 nucleosides, or a range of nucleotides defined by any two of the aforementioned numbers. In some embodiments, the 5′ overhang comprises 1, 2, or more nucleosides. In some embodiments, the 5′ overhang comprises 2 nucleosides. In some embodiments, the antisense strand comprises a nucleoside sequence comprising or consisting of the sequence of any one of SEQ ID NOs: 6398-6417, or a nucleic acid sequence thereof having 1 or 2 nucleoside additions at the 3′ end. In some embodiments, the composition comprises an oligonucleotide that inhibits the expression of MST1, wherein the oligonucleotide comprises an siRNA comprising a sense strand and an antisense strand, wherein the antisense strand comprises a nucleoside sequence comprising or consisting of the sequence of any one of SEQ ID NOs: 6398-6417. The sense strand or antisense strand may comprise any modifications described herein. The sense strand or antisense strand may comprise a lipid moiety or a GalNAc moiety.

[0037] In some embodiments, the siRNA comprises the sense strand and/or the antisense strand sequence of an siRNA in any one of Tables 3-8, or a nucleic acid sequence thereof having 3 or 4 nucleoside substitutions, additions, or deletions. In some embodiments, the siRNA comprises the sense strand and/or the antisense strand sequence of an siRNA in any one of Tables 3-8, or a nucleic acid sequence thereof having 1 or 2 nucleoside substitutions, additions, or deletions. In some embodiments, the siRNA comprises the sense strand and/or the antisense strand sequence of an siRNA in any one of Tables 3-8. In some embodiments, the siRNA is cross-reactive with a non-human primate (NHP) MST1 mRNA. The sense strand or antisense strand may comprise any modifications described herein. The sense strand or antisense strand may comprise a lipid moiety or a GalNAc moiety.

[0038] In some embodiments, the siRNA comprises the sequence of a sense strand in Table 24B, or a nucleic acid sequence thereof having 3 or 4 nucleoside substitutions, additions, or deletions. In some embodiments, the siRNA comprises the sequence of a sense strand in Table 24B, or a nucleic acid sequence thereof having 1 or 2 nucleoside substitutions, additions, or deletions. In some embodiments, the siRNA comprises the sequence of a sense strand in Table 24B. The sense strand may include any of these sequences may include an overhang such as a 3′ UU overhang. The sense strand may include any modifications described herein. The sense strand may include a lipid moiety or a GalNAc moiety. In some embodiments, the siRNA comprises the sequence of an antisense strand in Table 24B, or a nucleic acid sequence thereof having 3 or 4 nucleoside substitutions, additions, or deletions. In some embodiments, the siRNA comprises the sequence of an antisense strand in Table 24B, or a nucleic acid sequence thereof having 1 or 2 nucleoside substitutions, additions, or deletions. In some embodiments, the siRNA comprises the sequence of an antisense strand in Table 24B. The antisense strand may include any of these sequences may include an overhang such as a 3′ UU overhang. The antisense strand may include any modifications described herein. The antisense strand may include a lipid moiety or a GalNAc moiety.

[0039] In some embodiments, the siRNA comprises the sequence of a sense strand in Table 24D, or a nucleic acid sequence thereof having 3 or 4 nucleoside substitutions, additions, or deletions. In some embodiments, the siRNA comprises the sequence of a sense strand in Table 24D, or a nucleic acid sequence thereof having 1 or 2 nucleoside substitutions, additions, or deletions. In some embodiments, the siRNA comprises the sequence of a sense strand in Table 24D. The sense strand may include any of these sequences may include an overhang such as a 3′ UU overhang. The sense strand may include any modifications described herein. The sense strand may include a lipid moiety or a GalNAc moiety. In some embodiments, the siRNA comprises the sequence of an antisense strand in Table 24D, or a nucleic acid sequence thereof having 3 or 4 nucleoside substitutions, additions, or deletions. In some embodiments, the siRNA comprises the sequence of an antisense strand in Table 24D, or a nucleic acid sequence thereof having 1 or 2 nucleoside substitutions, additions, or deletions. In some embodiments, the siRNA comprises the sequence of an antisense strand in Table 24D. The antisense strand may include any of these sequences may include an overhang such as a 3′ UU overhang. The antisense strand may include any modifications described herein. The antisense strand may include a lipid moiety or a GalNAc moiety.

[0040] In some embodiments, the siRNA comprises the sense strand and/or the antisense strand sequence of an siRNA in Table 33B or Table 33C, or a nucleic acid sequence thereof having 3 or 4 nucleoside substitutions, additions, or deletions. In some embodiments, the siRNA comprises the sense strand and/or the antisense strand sequence of an siRNA in Table 33B or Table 33C, or a nucleic acid sequence thereof having 1 or 2 nucleoside substitutions, additions, or deletions. In some embodiments, the siRNA comprises the sense strand and/or the antisense strand sequence of an siRNA in Table 33B or Table 33C. In some embodiments, the siRNA is cross-reactive with a non-human primate (NHP) MST1 mRNA. The sense strand or antisense strand may comprise any modifications described herein. The sense strand or antisense strand may comprise a lipid moiety or a GalNAc moiety.

[0041] The siRNA may comprise the sense strand and/or the antisense strand base sequence (e.g. unmodified sequence, or base sequence with other modifications) of an siRNA in any table included herein; or may include a nucleic acid sequence thereof having 1 or 2 nucleoside substitutions, additions, or deletions; or may include a nucleic acid sequence thereof having 3 or 4 nucleoside substitutions, additions, or deletions. In some cases, the sequence does not include an overhang (e.g. UU) that is included in a table.

[0042] In some embodiments, the siRNA comprises the sense strand and/or the antisense strand sequence of an siRNA of subset A, or a nucleic acid sequence thereof having 3 or 4 nucleoside substitutions, additions, or deletions. In some embodiments, the siRNA comprises the sense strand and/or the antisense strand sequence of an siRNA of subset A, or a nucleic acid sequence thereof having 1 or 2 nucleoside substitutions, additions, or deletions. In some embodiments, the siRNA comprises the sense strand and/or the antisense strand sequence of an siRNA of subset A. In some embodiments, the siRNA is cross-reactive with a non-human primate (NHP) MST1 mRNA. The sense strand or antisense strand may comprise any modifications described herein. The sense strand or antisense strand may comprise a lipid moiety or a GalNAc moiety.

[0043] In some embodiments, the siRNA comprises the sense strand and/or the antisense strand sequence of an siRNA of subset B, or a nucleic acid sequence thereof having 3 or 4 nucleoside substitutions, additions, or deletions. In some embodiments, the siRNA comprises the sense strand and/or the antisense strand sequence of an siRNA of subset B, or a nucleic acid sequence thereof having 1 or 2 nucleoside substitutions, additions, or deletions. In some embodiments, the siRNA comprises the sense strand and/or the antisense strand sequence of an siRNA of subset B. In some embodiments, the siRNA is cross-reactive with a non-human primate (NHP) MST1 mRNA. The sense strand or antisense strand may comprise any modifications described herein. The sense strand or antisense strand may comprise a lipid moiety or a GalNAc moiety.

[0044] In some embodiments, the siRNA comprises the sense strand and/or the antisense strand sequence of an siRNA of subset C, or a nucleic acid sequence thereof having 3 or 4 nucleoside substitutions, additions, or deletions. In some embodiments, the siRNA comprises the sense strand and/or the antisense strand sequence of an siRNA of subset C, or a nucleic acid sequence thereof having 1 or 2 nucleoside substitutions, additions, or deletions. In some embodiments, the siRNA comprises the sense strand and/or the antisense strand sequence of an siRNA of subset C. In some embodiments, the siRNA is cross-reactive with a non-human primate (NHP) MST1 mRNA. The sense strand or antisense strand may comprise any modifications described herein. The sense strand or antisense strand may comprise a lipid moiety or a GalNAc moiety.

[0045] In some embodiments, the siRNA comprises the sense strand and/or the antisense strand sequence of an siRNA of subset D, or a nucleic acid sequence thereof having 3 or 4 nucleoside substitutions, additions, or deletions. In some embodiments, the siRNA comprises the sense strand and/or the antisense strand sequence of an siRNA of subset D, or a nucleic acid sequence thereof having 1 or 2 nucleoside substitutions, additions, or deletions. In some embodiments, the siRNA comprises the sense strand and/or the antisense strand sequence of an siRNA of subset D. In some embodiments, the siRNA is cross-reactive with a non-human primate (NHP) MST1 mRNA. The sense strand or antisense strand may comprise any modifications described herein. The sense strand or antisense strand may comprise a lipid moiety or a GalNAc moiety.

[0046] In some embodiments, the siRNA comprises the sense strand and/or the antisense strand sequence of an siRNA of subset E, or a nucleic acid sequence thereof having 3 or 4 nucleoside substitutions, additions, or deletions. In some embodiments, the siRNA comprises the sense strand and/or the antisense strand sequence of an siRNA of subset E, or a nucleic acid sequence thereof having 1 or 2 nucleoside substitutions, additions, or deletions. In some embodiments, the siRNA comprises the sense strand and/or the antisense strand sequence of an siRNA of subset E. In some embodiments, the siRNA is cross-reactive with a non-human primate (NHP) MST1 mRNA. The sense strand or antisense strand may comprise any modifications described herein. The sense strand or antisense strand may comprise a lipid moiety or a GalNAc moiety.

[0047] In some embodiments, the siRNA comprises the sense strand and/or the antisense strand sequence of an siRNA of subset F, or a nucleic acid sequence thereof having 3 or 4 nucleoside substitutions, additions, or deletions. In some embodiments, the siRNA comprises the sense strand and/or the antisense strand sequence of an siRNA of subset F, or a nucleic acid sequence thereof having 1 or 2 nucleoside substitutions, additions, or deletions. In some embodiments, the siRNA comprises the sense strand and/or the antisense strand sequence of an siRNA of subset F. In some embodiments, the siRNA is cross-reactive with a non-human primate (NHP) MST1 mRNA. The sense strand or antisense strand may comprise any modifications described herein. The sense strand or antisense strand may comprise a lipid moiety or a GalNAc moiety.

[0048] In some embodiments, the siRNA comprises a sense strand having a sequence in accordance with any of SEQ ID NOs: 6373, 6375, 6385, 6386, or 6387. In some embodiments, the sense strand sequence comprises or consists of sequence at least 75% identical to any one of SEQ ID NOs: 6373, 6375, 6385, 6386, or 6387, at least 80% identical to any one of SEQ ID NOs: 6373, 6375, 6385, 6386, or 6387, at least 85% identical to of any one of SEQ ID NOs: 6373, 6375, 6385, 6386, or 6387, at least 90% identical to any one of SEQ ID NOs: 6373, 6375, 6385, 6386, or 6387, or at least 95% identical to any one of SEQ ID NOs: 6373, 6375, 6385, 6386, or 6387. In some embodiments, the sense strand sequence comprises or consists of the sequence of any one of SEQ ID NOs 6373, 6375, 6385, 6386, or 6387, or a sense strand sequence thereof having 1, 2, 3, or 4 nucleoside substitutions, additions, or deletions. In some embodiments, the sense strand sequence comprises or consists of the sequence of any one of SEQ ID NOs: 6373, 6375, 6385, 6386, or 6387, or a sense strand sequence thereof having 1 or 2 nucleoside substitutions, additions, or deletions. In some embodiments, the sense strand sequence comprises or consists of a sequence 100% identical to SEQ ID NOs: 6373, 6375, 6385, 6386, or 6387. The sense strand sequence may include the first 5, 6, 7, 8, 9, 10, 11, 12, 13, 14, 15, 16, 17, 18, or 19 nucleotides (in the 5′ to 3′ direction) of any of the aforementioned sequences. The sense strand sequence may include the last 5, 6, 7, 8, 9, 10, 11, 12, 13, 14, 15, 16, 17, 18, or 19 nucleotides (in the 5′ to 3′ direction) of any of the aforementioned sequences. The sense strand may comprise a modification pattern described herein. The sense strand may comprise an overhang. The sense strand may comprise a lipid moiety. The sense strand may comprise a GalNAc moiety.

[0049] In some embodiments, the siRNA comprises an antisense strand having a sequence in accordance with any of SEQ ID NOs: 6403, 6405, 6415, 6416, or 6417. In some embodiments, the antisense strand sequence comprises or consists of sequence at least 75% identical to any one of SEQ ID NOs: 6403, 6405, 6415, 6416, or 6417, at least 80% identical to any one of SEQ ID NOs: 6403, 6405, 6415, 6416, or 6417, at least 85% identical to of any one of SEQ ID NOs: 6403, 6405, 6415, 6416, or 6417, at least 90% identical to any one of SEQ ID NOs: 6403, 6405, 6415, 6416, or 6417, or at least 95% identical to any one of SEQ ID NOs: 6403, 6405, 6415, 6416, or 6417. In some embodiments, the antisense strand sequence comprises or consists of the sequence of any one of SEQ ID NOs: 6403, 6405, 6415, 6416, or 6417, or an antisense strand sequence thereof having 1, 2, 3, or 4 nucleoside substitutions, additions, or deletions. In some embodiments, the antisense strand sequence comprises or consists of the sequence of any one of SEQ ID NOs: 6403, 6405, 6415, 6416, or 6417, or an antisense strand sequence thereof having 1 or 2 nucleoside substitutions, additions, or deletions. In some embodiments, the antisense strand sequence comprises or consists of a sequence 100% identical to SEQ ID NOs: 6403, 6405, 6415, 6416, or 6417. The antisense strand sequence may include the first 5, 6, 7, 8, 9, 10, 11, 12, 13, 14, 15, 16, 17, 18, or 19 nucleotides (in the 5′ to 3′ direction) of any of the aforementioned sequences. The antisense strand sequence may include the last 5, 6, 7, 8, 9, 10, 11, 12, 13, 14, 15, 16, 17, 18, or 19 nucleotides (in the 5′ to 3′ direction) of any of the aforementioned sequences. The antisense strand may comprise an overhang. The antisense strand may comprise a modification pattern described herein. The antisense strand may comprise a lipid moiety or a GalNAc moiety.

[0050] In some embodiments, the siRNA comprises a sense strand having a sequence in accordance with SEQ ID NO: 6373. In some embodiments, the sense strand sequence comprises or consists of sequence at least 75% identical to SEQ ID NO: 6373, at least 80% identical to SEQ ID NO: 6373, at least 85% identical to SEQ ID NO: 6373, at least 90% identical to SEQ ID NO: 6373, or at least 95% identical to SEQ ID NO: 6373. In some embodiments, the sense strand sequence comprises or consists of the sequence of SEQ ID NO 6373, or a sense strand sequence thereof having 1, 2, 3, or 4 nucleoside substitutions, additions, or deletions. In some embodiments, the sense strand sequence comprises or consists of the sequence of SEQ ID NO: 6373, or a sense strand sequence thereof having 1 or 2 nucleoside substitutions, additions, or deletions. In some embodiments, the sense strand sequence comprises or consists of a sequence 100% identical to SEQ ID NO: 6373. The sense strand may comprise a modification pattern described herein. The sense strand may comprise an overhang. The sense strand may comprise a lipid moiety. The sense strand may comprise a GalNAc moiety.

[0051] In some embodiments, the siRNA comprises a sense strand having a sequence in accordance with SEQ ID NO: 6374. In some embodiments, the sense strand sequence comprises or consists of sequence at least 75% identical to SEQ ID NO: 6374, at least 80% identical to SEQ ID NO: 6374, at least 85% identical to SEQ ID NO: 6374, at least 90% identical to SEQ ID NO: 6374, or at least 95% identical to SEQ ID NO: 6374. In some embodiments, the sense strand sequence comprises or consists of the sequence of SEQ ID NO 6374, or a sense strand sequence thereof having 1, 2, 3, or 4 nucleoside substitutions, additions, or deletions. In some embodiments, the sense strand sequence comprises or consists of the sequence of SEQ ID NO: 6374, or a sense strand sequence thereof having 1 or 2 nucleoside substitutions, additions, or deletions. In some embodiments, the sense strand sequence comprises or consists of a sequence 100% identical to SEQ ID NO: 6374. The sense strand may comprise a modification pattern described herein. The sense strand may comprise an overhang. The sense strand may comprise a lipid moiety. The sense strand may comprise a GalNAc moiety.

[0052] In some embodiments, the siRNA comprises a sense strand having a sequence in accordance with SEQ ID NO: 6385. In some embodiments, the sense strand sequence comprises or consists of sequence at least 75% identical to SEQ ID NO: 6385, at least 80% identical to SEQ ID NO: 6385, at least 85% identical to SEQ ID NO: 6385, at least 90% identical to SEQ ID NO: 6385, or at least 95% identical to SEQ ID NO: 6385. In some embodiments, the sense strand sequence comprises or consists of the sequence of SEQ ID NO 6385, or a sense strand sequence thereof having 1, 2, 3, or 4 nucleoside substitutions, additions, or deletions. In some embodiments, the sense strand sequence comprises or consists of the sequence of SEQ ID NO: 6385, or a sense strand sequence thereof having 1 or 2 nucleoside substitutions, additions, or deletions. In some embodiments, the sense strand sequence comprises or consists of a sequence 100% identical to SEQ ID NO: 6385. The sense strand may comprise a modification pattern described herein. The sense strand may comprise an overhang. The sense strand may comprise a lipid moiety. The sense strand may comprise a GalNAc moiety.

[0053] In some embodiments, the siRNA comprises a sense strand having a sequence in accordance with SEQ ID NO: 6386. In some embodiments, the sense strand sequence comprises or consists of sequence at least 75% identical to SEQ ID NO: 6386, at least 80% identical to SEQ ID NO: 6386, at least 85% identical to SEQ ID NO: 6386, at least 90% identical to SEQ ID NO: 6386, or at least 95% identical to SEQ ID NO: 6386. In some embodiments, the sense strand sequence comprises or consists of the sequence of SEQ ID NO 6386, or a sense strand sequence thereof having 1, 2, 3, or 4 nucleoside substitutions, additions, or deletions. In some embodiments, the sense strand sequence comprises or consists of the sequence of SEQ ID NO: 6386, or a sense strand sequence thereof having 1 or 2 nucleoside substitutions, additions, or deletions. In some embodiments, the sense strand sequence comprises or consists of a sequence 100% identical to SEQ ID NO: 6386. The sense strand may comprise a modification pattern described herein. The sense strand may comprise an overhang. The sense strand may comprise a lipid moiety. The sense strand may comprise a GalNAc moiety.

[0054] In some embodiments, the siRNA comprises a sense strand having a sequence in accordance with SEQ ID NO: 6387. In some embodiments, the sense strand sequence comprises or consists of sequence at least 75% identical to SEQ ID NO: 6387, at least 80% identical to SEQ ID NO: 6387, at least 85% identical to SEQ ID NO: 6387, at least 90% identical to SEQ ID NO: 6387, or at least 95% identical to SEQ ID NO: 6387. In some embodiments, the sense strand sequence comprises or consists of the sequence of SEQ ID NO 6387, or a sense strand sequence thereof having 1, 2, 3, or 4 nucleoside substitutions, additions, or deletions. In some embodiments, the sense strand sequence comprises or consists of the sequence of SEQ ID NO: 6387, or a sense strand sequence thereof having 1 or 2 nucleoside substitutions, additions, or deletions. In some embodiments, the sense strand sequence comprises or consists of a sequence 100% identical to SEQ ID NO: 6387. The sense strand may comprise a modification pattern described herein. The sense strand may comprise an overhang. The sense strand may comprise a lipid moiety. The sense strand may comprise a GalNAc moiety.

[0055] In some embodiments, the siRNA comprises an antisense strand having a sequence in accordance with SEQ ID NO: 6403. In some embodiments, the antisense strand sequence comprises or consists of sequence at least 75% identical to SEQ ID NO: 6403, at least 80% identical to SEQ ID NO: 6403, at least 85% identical to SEQ ID NO: 6403, at least 90% identical to SEQ ID NO: 6403, or at least 95% identical to SEQ ID NO: 6403. In some embodiments, the antisense strand sequence comprises or consists of the sequence of SEQ ID NO 6403, or an antisense strand sequence thereof having 1, 2, 3, or 4 nucleoside substitutions, additions, or deletions. In some embodiments, the antisense strand sequence comprises or consists of the sequence of SEQ ID NO: 6403, or an antisense strand sequence thereof having 1 or 2 nucleoside substitutions, additions, or deletions. In some embodiments, the antisense strand sequence comprises or consists of a sequence 100% identical to SEQ ID NO: 6403. The antisense strand may comprise a modification pattern described herein. The antisense strand may comprise an overhang. The antisense strand may comprise a lipid moiety. The antisense strand may comprise a GalNAc moiety.

[0056] In some embodiments, the siRNA comprises an antisense strand having a sequence in accordance with SEQ ID NO: 6405. In some embodiments, the antisense strand sequence comprises or consists of sequence at least 75% identical to SEQ ID NO: 6405, at least 80% identical to SEQ ID NO: 6405, at least 85% identical to SEQ ID NO: 6405, at least 90% identical to SEQ ID NO: 6405, or at least 95% identical to SEQ ID NO: 6405. In some embodiments, the antisense strand sequence comprises or consists of the sequence of SEQ ID NO 6405, or an antisense strand sequence thereof having 1, 2, 3, or 4 nucleoside substitutions, additions, or deletions. In some embodiments, the antisense strand sequence comprises or consists of the sequence of SEQ ID NO: 6405, or an antisense strand sequence thereof having 1 or 2 nucleoside substitutions, additions, or deletions. In some embodiments, the antisense strand sequence comprises or consists of a sequence 100% identical to SEQ ID NO: 6405. The antisense strand may comprise a modification pattern described herein. The antisense strand may comprise an overhang. The antisense strand may comprise a lipid moiety. The antisense strand may comprise a GalNAc moiety.

[0057] In some embodiments, the siRNA comprises an antisense strand having a sequence in accordance with SEQ ID NO: 6415. In some embodiments, the antisense strand sequence comprises or consists of sequence at least 75% identical to SEQ ID NO: 6415, at least 80% identical to SEQ ID NO: 6415, at least 85% identical to SEQ ID NO: 6415, at least 90% identical to SEQ ID NO: 6415, or at least 95% identical to SEQ ID NO: 6415. In some embodiments, the antisense strand sequence comprises or consists of the sequence of SEQ ID NO 6415, or an antisense strand sequence thereof having 1, 2, 3, or 4 nucleoside substitutions, additions, or deletions. In some embodiments, the antisense strand sequence comprises or consists of the sequence of SEQ ID NO: 6415, or an antisense strand sequence thereof having 1 or 2 nucleoside substitutions, additions, or deletions. In some embodiments, the antisense strand sequence comprises or consists of a sequence 100% identical to SEQ ID NO: 6415. The antisense strand may comprise a modification pattern described herein. The antisense strand may comprise an overhang. The antisense strand may comprise a lipid moiety. The antisense strand may comprise a GalNAc moiety.

[0058] In some embodiments, the siRNA comprises an antisense strand having a sequence in accordance with SEQ ID NO: 6416. In some embodiments, the antisense strand sequence comprises or consists of sequence at least 75% identical to SEQ ID NO: 6416, at least 80% identical to SEQ ID NO: 6416, at least 85% identical to SEQ ID NO: 6416, at least 90% identical to SEQ ID NO: 6416, or at least 95% identical to SEQ ID NO: 6416. In some embodiments, the antisense strand sequence comprises or consists of the sequence of SEQ ID NO 6416, or an antisense strand sequence thereof having 1, 2, 3, or 4 nucleoside substitutions, additions, or deletions. In some embodiments, the antisense strand sequence comprises or consists of the sequence of SEQ ID NO: 6416, or an antisense strand sequence thereof having 1 or 2 nucleoside substitutions, additions, or deletions. In some embodiments, the antisense strand sequence comprises or consists of a sequence 100% identical to SEQ ID NO: 6416. The antisense strand may comprise a modification pattern described herein. The antisense strand may comprise an overhang. The antisense strand may comprise a lipid moiety. The antisense strand may comprise a GalNAc moiety.

[0059] In some embodiments, the siRNA comprises an antisense strand having a sequence in accordance with SEQ ID NO: 6417. In some embodiments, the antisense strand sequence comprises or consists of sequence at least 75% identical to SEQ ID NO: 6417, at least 80% identical to SEQ ID NO: 6417, at least 85% identical to SEQ ID NO: 6417, at least 90% identical to SEQ ID NO: 6417, or at least 95% identical to SEQ ID NO: 6417. In some embodiments, the antisense strand sequence comprises or consists of the sequence of SEQ ID NO 6417, or an antisense strand sequence thereof having 1, 2, 3, or 4 nucleoside substitutions, additions, or deletions. In some embodiments, the antisense strand sequence comprises or consists of the sequence of SEQ ID NO: 6417, or an antisense strand sequence thereof having 1 or 2 nucleoside substitutions, additions, or deletions. In some embodiments, the antisense strand sequence comprises or consists of a sequence 100% identical to SEQ ID NO: 6417. The antisense strand may comprise a modification pattern described herein. The antisense strand may comprise an overhang. The antisense strand may comprise a lipid moiety. The antisense strand may comprise a GalNAc moiety.

[0060] In some embodiments, the siRNA comprises a sense strand having a sequence in accordance with SEQ ID NO: 6440. In some embodiments, the sense strand sequence comprises or consists of sequence at least 75% identical to SEQ ID NO: 6440, at least 80% identical to SEQ ID NO: 6440, at least 85% identical to SEQ ID NO: 6440, at least 90% identical to SEQ ID NO: 6440, or at least 95% identical to SEQ ID NO: 6440. In some embodiments, the sense strand sequence comprises or consists of the sequence of SEQ ID NO 6440, or a sense strand sequence thereof having 1, 2, 3, or 4 nucleoside substitutions, additions, or deletions. In some embodiments, the sense strand sequence comprises or consists of the sequence of SEQ ID NO: 6440, or a sense strand sequence thereof having 1 or 2 nucleoside substitutions, additions, or deletions. In some embodiments, the sense strand sequence comprises or consists of a sequence 100% identical to SEQ ID NO: 6440. The sense strand may comprise a modification pattern described herein. The sense strand may comprise an overhang. The sense strand may comprise a moiety such as a GalNAc moiety or a lipid moiety. In some embodiments, the siRNA comprises an antisense strand having a sequence in accordance with SEQ ID NO: 6499. In some embodiments, the antisense strand sequence comprises or consists of sequence at least 75% identical to SEQ ID NO: 6499, at least 80% identical to SEQ ID NO: 6499, at least 85% identical to SEQ ID NO: 6499, at least 90% identical to SEQ ID NO: 6499, or at least 95% identical to SEQ ID NO: 6499. In some embodiments, the antisense strand sequence comprises or consists of the sequence of SEQ ID NO 6499, or an antisense strand sequence thereof having 1, 2, 3, or 4 nucleoside substitutions, additions, or deletions. In some embodiments, the antisense strand sequence comprises or consists of the sequence of SEQ ID NO: 6499, or an antisense strand sequence thereof having 1 or 2 nucleoside substitutions, additions, or deletions. In some embodiments, the antisense strand sequence comprises or consists of a sequence 100% identical to SEQ ID NO: 6499. The antisense strand may comprise a modification pattern described herein. The antisense strand may comprise an overhang. The antisense strand may comprise a moiety such as a GalNAc moiety or a lipid moiety.

[0061] In some embodiments, the siRNA comprises a sense strand having a sequence in accordance with SEQ ID NO: 6446. In some embodiments, the sense strand sequence comprises or consists of sequence at least 75% identical to SEQ ID NO: 6446, at least 80% identical to SEQ ID NO: 6446, at least 85% identical to SEQ ID NO: 6446, at least 90% identical to SEQ ID NO: 6446, or at least 95% identical to SEQ ID NO: 6446. In some embodiments, the sense strand sequence comprises or consists of the sequence of SEQ ID NO 6446, or a sense strand sequence thereof having 1, 2, 3, or 4 nucleoside substitutions, additions, or deletions. In some embodiments, the sense strand sequence comprises or consists of the sequence of SEQ ID NO: 6446, or a sense strand sequence thereof having 1 or 2 nucleoside substitutions, additions, or deletions. In some embodiments, the sense strand sequence comprises or consists of a sequence 100% identical to SEQ ID NO: 6446. The sense strand may comprise a modification pattern described herein. The sense strand may comprise an overhang. The sense strand may comprise a moiety such as a GalNAc moiety or a lipid moiety. In some embodiments, the siRNA comprises an antisense strand having a sequence in accordance with SEQ ID NO: 6505. In some embodiments, the antisense strand sequence comprises or consists of sequence at least 75% identical to SEQ ID NO: 6505, at least 80% identical to SEQ ID NO: 6505, at least 85% identical to SEQ ID NO: 6505, at least 90% identical to SEQ ID NO: 6505, or at least 95% identical to SEQ ID NO: 6505. In some embodiments, the antisense strand sequence comprises or consists of the sequence of SEQ ID NO 6505, or an antisense strand sequence thereof having 1, 2, 3, or 4 nucleoside substitutions, additions, or deletions. In some embodiments, the antisense strand sequence comprises or consists of the sequence of SEQ ID NO: 6505, or an antisense strand sequence thereof having 1 or 2 nucleoside substitutions, additions, or deletions. In some embodiments, the antisense strand sequence comprises or consists of a sequence 100% identical to SEQ ID NO: 6505. The antisense strand may comprise a modification pattern described herein. The antisense strand may comprise an overhang. The antisense strand may comprise a moiety such as a GalNAc moiety or a lipid moiety.

[0062] In some embodiments, the siRNA comprises a sense strand having a sequence in accordance with SEQ ID NO: 6447. In some embodiments, the sense strand sequence comprises or consists of sequence at least 75% identical to SEQ ID NO: 6447, at least 80% identical to SEQ ID NO: 6447, at least 85% identical to SEQ ID NO: 6447, at least 90% identical to SEQ ID NO: 6447, or at least 95% identical to SEQ ID NO: 6447. In some embodiments, the sense strand sequence comprises or consists of the sequence of SEQ ID NO 6447, or a sense strand sequence thereof having 1, 2, 3, or 4 nucleoside substitutions, additions, or deletions. In some embodiments, the sense strand sequence comprises or consists of the sequence of SEQ ID NO: 6447, or a sense strand sequence thereof having 1 or 2 nucleoside substitutions, additions, or deletions. In some embodiments, the sense strand sequence comprises or consists of a sequence 100% identical to SEQ ID NO: 6447. The sense strand may comprise a modification pattern described herein. The sense strand may comprise an overhang. The sense strand may comprise a moiety such as a GalNAc moiety or a lipid moiety. In some embodiments, the siRNA comprises an antisense strand having a sequence in accordance with SEQ ID NO: 6506. In some embodiments, the antisense strand sequence comprises or consists of sequence at least 75% identical to SEQ ID NO: 6506, at least 80% identical to SEQ ID NO: 6506, at least 85% identical to SEQ ID NO: 6506, at least 90% identical to SEQ ID NO: 6506, or at least 95% identical to SEQ ID NO: 6506. In some embodiments, the antisense strand sequence comprises or consists of the sequence of SEQ ID NO 6506, or an antisense strand sequence thereof having 1, 2, 3, or 4 nucleoside substitutions, additions, or deletions. In some embodiments, the antisense strand sequence comprises or consists of the sequence of SEQ ID NO: 6506, or an antisense strand sequence thereof having 1 or 2 nucleoside substitutions, additions, or deletions. In some embodiments, the antisense strand sequence comprises or consists of a sequence 100% identical to SEQ ID NO: 6506. The antisense strand may comprise a modification pattern described herein. The antisense strand may comprise an overhang. The antisense strand may comprise a moiety such as a GalNAc moiety or a lipid moiety.

[0063] In some embodiments, the siRNA comprises a sense strand having a sequence in accordance with SEQ ID NO: 6448. In some embodiments, the sense strand sequence comprises or consists of sequence at least 75% identical to SEQ ID NO: 6448, at least 80% identical to SEQ ID NO: 6448, at least 85% identical to SEQ ID NO: 6448, at least 90% identical to SEQ ID NO: 6448, or at least 95% identical to SEQ ID NO: 6448. In some embodiments, the sense strand sequence comprises or consists of the sequence of SEQ ID NO 6448, or a sense strand sequence thereof having 1, 2, 3, or 4 nucleoside substitutions, additions, or deletions. In some embodiments, the sense strand sequence comprises or consists of the sequence of SEQ ID NO: 6448, or a sense strand sequence thereof having 1 or 2 nucleoside substitutions, additions, or deletions. In some embodiments, the sense strand sequence comprises or consists of a sequence 100% identical to SEQ ID NO: 6448. The sense strand may comprise a modification pattern described herein. The sense strand may comprise an overhang. The sense strand may comprise a moiety such as a GalNAc moiety or a lipid moiety. In some embodiments, the siRNA comprises an antisense strand having a sequence in accordance with SEQ ID NO: 6507. In some embodiments, the antisense strand sequence comprises or consists of sequence at least 75% identical to SEQ ID NO: 6507, at least 80% identical to SEQ ID NO: 6507, at least 85% identical to SEQ ID NO: 6507, at least 90% identical to SEQ ID NO: 6507, or at least 95% identical to SEQ ID NO: 6507. In some embodiments, the antisense strand sequence comprises or consists of the sequence of SEQ ID NO 6507, or an antisense strand sequence thereof having 1, 2, 3, or 4 nucleoside substitutions, additions, or deletions. In some embodiments, the antisense strand sequence comprises or consists of the sequence of SEQ ID NO: 6507, or an antisense strand sequence thereof having 1 or 2 nucleoside substitutions, additions, or deletions. In some embodiments, the antisense strand sequence comprises or consists of a sequence 100% identical to SEQ ID NO: 6507. The antisense strand may comprise a modification pattern described herein. The antisense strand may comprise an overhang. The antisense strand may comprise a moiety such as a GalNAc moiety or a lipid moiety.

[0064] In some embodiments, the siRNA comprises a sense strand having a sequence in accordance with SEQ ID NO: 6461. In some embodiments, the sense strand sequence comprises or consists of sequence at least 75% identical to SEQ ID NO: 6461, at least 80% identical to SEQ ID NO: 6461, at least 85% identical to SEQ ID NO: 6461, at least 90% identical to SEQ ID NO: 6461, or at least 95% identical to SEQ ID NO: 6461. In some embodiments, the sense strand sequence comprises or consists of the sequence of SEQ ID NO 6461, or a sense strand sequence thereof having 1, 2, 3, or 4 nucleoside substitutions, additions, or deletions. In some embodiments, the sense strand sequence comprises or consists of the sequence of SEQ ID NO: 6461, or a sense strand sequence thereof having 1 or 2 nucleoside substitutions, additions, or deletions. In some embodiments, the sense strand sequence comprises or consists of a sequence 100% identical to SEQ ID NO: 6461. The sense strand may comprise a modification pattern described herein. The sense strand may comprise an overhang. The sense strand may comprise a moiety such as a GalNAc moiety or a lipid moiety. In some embodiments, the siRNA comprises an antisense strand having a sequence in accordance with SEQ ID NO: 6520. In some embodiments, the antisense strand sequence comprises or consists of sequence at least 75% identical to SEQ ID NO: 6520, at least 80% identical to SEQ ID NO: 6520, at least 85% identical to SEQ ID NO: 6520, at least 90% identical to SEQ ID NO: 6520, or at least 95% identical to SEQ ID NO: 6520. In some embodiments, the antisense strand sequence comprises or consists of the sequence of SEQ ID NO 6520, or an antisense strand sequence thereof having 1, 2, 3, or 4 nucleoside substitutions, additions, or deletions. In some embodiments, the antisense strand sequence comprises or consists of the sequence of SEQ ID NO: 6520, or an antisense strand sequence thereof having 1 or 2 nucleoside substitutions, additions, or deletions. In some embodiments, the antisense strand sequence comprises or consists of a sequence 100% identical to SEQ ID NO: 6520. The antisense strand may comprise a modification pattern described herein. The antisense strand may comprise an overhang. The antisense strand may comprise a moiety such as a GalNAc moiety or a lipid moiety.

[0065] In some embodiments, the siRNA comprises a sense strand having a sequence in accordance with SEQ ID NO: 6466. In some embodiments, the sense strand sequence comprises or consists of sequence at least 75% identical to SEQ ID NO: 6466, at least 80% identical to SEQ ID NO: 6466, at least 85% identical to SEQ ID NO: 6466, at least 90% identical to SEQ ID NO: 6466, or at least 95% identical to SEQ ID NO: 6466. In some embodiments, the sense strand sequence comprises or consists of the sequence of SEQ ID NO 6466, or a sense strand sequence thereof having 1, 2, 3, or 4 nucleoside substitutions, additions, or deletions. In some embodiments, the sense strand sequence comprises or consists of the sequence of SEQ ID NO: 6466, or a sense strand sequence thereof having 1 or 2 nucleoside substitutions, additions, or deletions. In some embodiments, the sense strand sequence comprises or consists of a sequence 100% identical to SEQ ID NO: 6466. The sense strand may comprise a modification pattern described herein. The sense strand may comprise an overhang. The sense strand may comprise a moiety such as a GalNAc moiety or a lipid moiety. In some embodiments, the siRNA comprises an antisense strand having a sequence in accordance with SEQ ID NO: 6525. In some embodiments, the antisense strand sequence comprises or consists of sequence at least 75% identical to SEQ ID NO: 6525, at least 80% identical to SEQ ID NO: 6525, at least 85% identical to SEQ ID NO: 6525, at least 90% identical to SEQ ID NO: 6525, or at least 95% identical to SEQ ID NO: 6525. In some embodiments, the antisense strand sequence comprises or consists of the sequence of SEQ ID NO 6525, or an antisense strand sequence thereof having 1, 2, 3, or 4 nucleoside substitutions, additions, or deletions. In some embodiments, the antisense strand sequence comprises or consists of the sequence of SEQ ID NO: 6525, or an antisense strand sequence thereof having 1 or 2 nucleoside substitutions, additions, or deletions. In some embodiments, the antisense strand sequence comprises or consists of a sequence 100% identical to SEQ ID NO: 6525. The antisense strand may comprise a modification pattern described herein. The antisense strand may comprise an overhang. The antisense strand may comprise a moiety such as a GalNAc moiety or a lipid moiety.

[0066] In some embodiments, the siRNA comprises a sense strand having a sequence in accordance with SEQ ID NO: 6470. In some embodiments, the sense strand sequence comprises or consists of sequence at least 75% identical to SEQ ID NO: 6470, at least 80% identical to SEQ ID NO: 6470, at least 85% identical to SEQ ID NO: 6470, at least 90% identical to SEQ ID NO: 6470, or at least 95% identical to SEQ ID NO: 6470. In some embodiments, the sense strand sequence comprises or consists of the sequence of SEQ ID NO 6470, or a sense strand sequence thereof having 1, 2, 3, or 4 nucleoside substitutions, additions, or deletions. In some embodiments, the sense strand sequence comprises or consists of the sequence of SEQ ID NO: 6470, or a sense strand sequence thereof having 1 or 2 nucleoside substitutions, additions, or deletions. In some embodiments, the sense strand sequence comprises or consists of a sequence 100% identical to SEQ ID NO: 6470. The sense strand may comprise a modification pattern described herein. The sense strand may comprise an overhang. The sense strand may comprise a moiety such as a GalNAc moiety or a lipid moiety. In some embodiments, the siRNA comprises an antisense strand having a sequence in accordance with SEQ ID NO: 6529. In some embodiments, the antisense strand sequence comprises or consists of sequence at least 75% identical to SEQ ID NO: 6529, at least 80% identical to SEQ ID NO: 6529, at least 85% identical to SEQ ID NO: 6529, at least 90% identical to SEQ ID NO: 6529, or at least 95% identical to SEQ ID NO: 6529. In some embodiments, the antisense strand sequence comprises or consists of the sequence of SEQ ID NO 6529, or an antisense strand sequence thereof having 1, 2, 3, or 4 nucleoside substitutions, additions, or deletions. In some embodiments, the antisense strand sequence comprises or consists of the sequence of SEQ ID NO: 6529, or an antisense strand sequence thereof having 1 or 2 nucleoside substitutions, additions, or deletions. In some embodiments, the antisense strand sequence comprises or consists of a sequence 100% identical to SEQ ID NO: 6529. The antisense strand may comprise a modification pattern described herein. The antisense strand may comprise an overhang. The antisense strand may comprise a moiety such as a GalNAc moiety or a lipid moiety.

[0067] In some embodiments, the siRNA comprises a sense strand having a sequence in accordance with SEQ ID NO: 6476. In some embodiments, the sense strand sequence comprises or consists of sequence at least 75% identical to SEQ ID NO: 6476, at least 80% identical to SEQ ID NO: 6476, at least 85% identical to SEQ ID NO: 6476, at least 90% identical to SEQ ID NO: 6476, or at least 95% identical to SEQ ID NO: 6476. In some embodiments, the sense strand sequence comprises or consists of the sequence of SEQ ID NO 6476, or a sense strand sequence thereof having 1, 2, 3, or 4 nucleoside substitutions, additions, or deletions. In some embodiments, the sense strand sequence comprises or consists of the sequence of SEQ ID NO: 6476, or a sense strand sequence thereof having 1 or 2 nucleoside substitutions, additions, or deletions. In some embodiments, the sense strand sequence comprises or consists of a sequence 100% identical to SEQ ID NO: 6476. The sense strand may comprise a modification pattern described herein. The sense strand may comprise an overhang. The sense strand may comprise a moiety such as a GalNAc moiety or a lipid moiety. In some embodiments, the siRNA comprises an antisense strand having a sequence in accordance with SEQ ID NO: 6535. In some embodiments, the antisense strand sequence comprises or consists of sequence at least 75% identical to SEQ ID NO: 6535, at least 80% identical to SEQ ID NO: 6535, at least 85% identical to SEQ ID NO: 6535, at least 90% identical to SEQ ID NO: 6535, or at least 95% identical to SEQ ID NO: 6535. In some embodiments, the antisense strand sequence comprises or consists of the sequence of SEQ ID NO 6535, or an antisense strand sequence thereof having 1, 2, 3, or 4 nucleoside substitutions, additions, or deletions. In some embodiments, the antisense strand sequence comprises or consists of the sequence of SEQ ID NO: 6535, or an antisense strand sequence thereof having 1 or 2 nucleoside substitutions, additions, or deletions. In some embodiments, the antisense strand sequence comprises or consists of a sequence 100% identical to SEQ ID NO: 6535. The antisense strand may comprise a modification pattern described herein. The antisense strand may comprise an overhang. The antisense strand may comprise a moiety such as a GalNAc moiety or a lipid moiety.

[0068] B. ASOs

[0069] In some embodiments, the composition comprises an oligonucleotide that inhibits the expression of MST1, wherein the oligonucleotide comprises an antisense oligonucleotide (ASO). In some embodiments, the ASO is 12-30 nucleosides in length. In some embodiments, the ASO is 14-30 nucleosides in length. In some embodiments, the ASO is at least about 10, 11, 12, 13, 14, 15, 16, 17, 18, 19, 20, 21, 22, 23, 24, 25, 26, 27, 28, 29, or 30 nucleosides in length, or a range defined by any of the two aforementioned numbers. In some embodiments, the ASO is 15-25 nucleosides in length. In some embodiments, the ASO is 20 nucleosides in length.

[0070] In some embodiments, the composition comprises an oligonucleotide that inhibits the expression of MST1, wherein the oligonucleotide comprises an ASO about 12-30 nucleosides in length and comprising a nucleoside sequence complementary to about 12-30 contiguous nucleosides of a full-length human MST1 mRNA sequence such as SEQ ID NO: 6163; wherein (i) the oligonucleotide comprises a modification comprising a modified nucleoside and/or a modified internucleoside linkage, and/or (ii) the composition comprises a pharmaceutically acceptable carrier. In some embodiments, the ASO comprise a nucleoside sequence complementary to at least about 10, 11, 12, 13, 14, 15, 16, 17, 18, 19, 20, 21, 22, 23, 24, 25, 26, 27, 28, 29, 30, or more contiguous nucleosides of one of SEQ ID NO: 6163.

[0071] In some embodiments, the composition comprises an oligonucleotide that inhibits the expression of MST1, wherein the oligonucleotide comprises an ASO about 12-30 nucleosides in length and comprising a nucleoside sequence complementary to about 12-30 contiguous nucleosides of a full-length human MST1 mRNA sequence such as SEQ ID NO: 6185; wherein (i) the oligonucleotide comprises a modification comprising a modified nucleoside and/or a modified internucleoside linkage, and/or (ii) the composition comprises a pharmaceutically acceptable carrier. In some embodiments, the ASO comprise a nucleoside sequence complementary to at least about 10, 11, 12, 13, 14, 15, 16, 17, 18, 19, 20, 21, 22, 23, 24, 25, 26, 27, 28, 29, 30, or more contiguous nucleosides of one of SEQ ID NO: 6185.

[0072] C. Modification Patterns

[0073] In some embodiments, the composition comprises an oligonucleotide that inhibits the expression of MST1, wherein the oligonucleotide comprises a modification comprising a modified nucleoside and/or a modified internucleoside linkage, and/or (ii) the composition comprises a pharmaceutically acceptable carrier. In some embodiments, the oligonucleotide comprises a modification comprising a modified nucleoside and/or a modified internucleoside linkage. In some embodiments, the oligonucleotide comprises a modified internucleoside linkage. In some embodiments, the modified internucleoside linkage comprises alkylphosphonate, phosphorothioate, methylphosphonate, phosphorodithioate, alkylphosphonothioate, phosphoramidate, carbamate, carbonate, phosphate triester, acetamidate, or carboxymethyl ester, or a combination thereof. In some embodiments, the modified internucleoside linkage comprises one or more phosphorothioate linkages. A phosphorothioate may include a nonbridging oxygen atom in a phosphate backbone of the oligonucleotide that is replaced by sulfur. Modified internucleoside linkages may be included in siRNAs or ASOs. Benefits of the modified internucleoside linkage may include decreased toxicity or improved pharmacokinetics.

[0074] In some embodiments, the composition comprises an oligonucleotide that inhibits the expression of MST1, wherein the oligonucleotide comprises a modified internucleoside linkage, wherein the oligonucleotide comprises 1, 2, 3, 4, 5, 6, 7, 8, 9, 10, 11, 12, 13, 14, 15, 16, 17, 18, 19, or 20 modified internucleoside linkages, or a range of modified internucleoside linkages defined by any two of the aforementioned numbers. In some embodiments, the oligonucleotide comprises no more than 18 modified internucleoside linkages. In some embodiments, the oligonucleotide comprises no more than 20 modified internucleoside linkages. In some embodiments, the oligonucleotide comprises 2 or more modified internucleoside linkages, 3 or more modified internucleoside linkages, 4 or more modified internucleoside linkages, 5 or more modified internucleoside linkages, 6 or more modified internucleoside linkages, 7 or more modified internucleoside linkages, 8 or more modified internucleoside linkages, 9 or more modified internucleoside linkages, 10 or more modified internucleoside linkages, 11 or more modified internucleoside linkages, 12 or more modified internucleoside linkages, 13 or more modified internucleoside linkages, 14 or more modified internucleoside linkages, 15 or more modified internucleoside linkages, 16 or more modified internucleoside linkages, 17 or more modified internucleoside linkages, 18 or more modified internucleoside linkages, 19 or more modified internucleoside linkages, or 20 or more modified internucleoside linkages.

[0075] In some embodiments, the composition comprises an oligonucleotide that inhibits the expression of MST1, wherein the oligonucleotide comprises the modified nucleoside. In some embodiments, the modified nucleoside comprises a locked nucleic acid (LNA), hexitol nucleic acid (HLA), cyclohexene nucleic acid (CeNA), 2′-methoxyethyl, 2′-O-alkyl, 2-O-allyl, 2′-fluoro, or 2′-deoxy, or a combination thereof. In some embodiments, the modified nucleoside comprises a LNA. In some embodiments, the modified nucleoside comprises a 2′,4′ constrained ethyl nucleic acid. In some embodiments, the modified nucleoside comprises HLA. In some embodiments, the modified nucleoside comprises CeNA. In some embodiments, the modified nucleoside comprises a 2′-methoxyethyl group. In some embodiments, the modified nucleoside comprises a 2′-O-alkyl group. In some embodiments, the modified nucleoside comprises a 2′-O-allyl group. In some embodiments, the modified nucleoside comprises a 2′-fluoro group. In some embodiments, the modified nucleoside comprises a 2′-deoxy group. In some embodiments, the modified nucleoside comprises a 2′-O-methyl nucleoside, 2′-deoxyfluoro nucleoside, 2′-O—N-methylacetamido (2′-O-NMA)nucleoside, a 2′-O-dimethylaminoethoxyethyl (2′-O-DMAEOE) nucleoside, 2-O-aminopropyl (2′-O-AP) nucleoside, or 2′-ara-F, or a combination thereof. In some embodiments, the modified nucleoside comprises a 2′-O-methyl nucleoside. In some embodiments, the modified nucleoside comprises a 2′-deoxyfluoro nucleoside. In some embodiments, the modified nucleoside comprises a 2′-O-NMA nucleoside. In some embodiments, the modified nucleoside comprises a 2′-O-DMAEOE nucleoside. In some embodiments, the modified nucleoside comprises a 2′-O-aminopropyl (2′-O-AP) nucleoside. In some embodiments, the modified nucleoside comprises 2′-ara-F. In some embodiments, the modified nucleoside comprises one or more 2′fluoro modified nucleosides. In some embodiments, the modified nucleoside comprises a 2′ O-alkyl modified nucleoside. Benefits of the modified nucleoside may include decreased toxicity or improved pharmacokinetics.

[0076] In some embodiments, the oligonucleotide comprises 1, 2, 3, 4, 5, 6, 7, 8, 9, 10, 11, 12, 13, 14, 15, 16, 17, 18, 19, 20, or 21 modified nucleosides, or a range of nucleosides defined by any two of the aforementioned numbers. In some embodiments, the oligonucleotide comprises no more than 19 modified nucleosides. In some embodiments, the oligonucleotide comprises no more than 21 modified nucleosides. In some embodiments, the oligonucleotide comprises 2 or more modified nucleosides, 3 or more modified nucleosides, 4 or more modified nucleosides, 5 or more modified nucleosides, 6 or more modified nucleosides, 7 or more modified nucleosides, 8 or more modified nucleosides, 9 or more modified nucleosides, 10 or more modified nucleosides, 11 or more modified nucleosides, 12 or more modified nucleosides, 13 or more modified nucleosides, 14 or more modified nucleosides, 15 or more modified nucleosides, 16 or more modified nucleosides, 17 or more modified nucleosides, 18 or more modified nucleosides, 19 or more modified nucleosides, 20 or more modified nucleosides, or 21 or more modified nucleosides.

[0077] In some embodiments, the composition comprises an oligonucleotide that inhibits the expression of MST1, wherein the oligonucleotide comprises a moiety attached at a 3′ or 5′ terminus of the oligonucleotide. Examples of moieties include an integrin targeting ligand, a hydrophobic moiety, a sugar moiety, or a combination thereof. In some embodiments, the oligonucleotide is an siRNA having a sense strand, and the moiety is attached to a 5′ end of the sense strand. In some embodiments, the oligonucleotide is an siRNA having a sense strand, and the moiety is attached to a 3′ end of the sense strand. In some embodiments, the oligonucleotide is an siRNA having an antisense strand, and the moiety is attached to a 5′ end of the antisense strand. In some embodiments, the oligonucleotide is an siRNA having an antisense strand, and the moiety is attached to a 3′ end of the antisense strand. In some embodiments, the oligonucleotide is an ASO, and the moiety is attached to a 5′ end of the ASO. In some embodiments, the oligonucleotide is an ASO, and the moiety is attached to a 3′ end of the ASO.

[0078] In some embodiments, the oligonucleotide is delivered to a cell or tissue by linking the oligonucleotide to a targeting group. In some embodiments, the targeting group includes a cell receptor ligand, such as an integrin targeting ligand. Integrins may include a family of transmembrane receptors that facilitate cell-extracellular matrix (ECM) adhesion. In some embodiments, the moiety includes an epithelial-specific integrin. Integrin alpha-v-beta-6 (αvβ6) bay be an example of an epithelial-specific integrin αvβ6 may be a receptor for an ECM protein or TGF-beta latency-associated peptide (LAP). Integrin αvβ6 may be expressed in a cell or tissue. Integrin αvβ6 may be expressed or upregulated in injured pulmonary epithelium.

[0079] In some embodiments, the oligonucleotide is linked to an integrin targeting ligand that has affinity for integrin αvβ6. An integrin targeting ligand may include a compound that has affinity for integrin αvβ6 or integrin alpha-v-beta-3 (αvβ3), may be useful as a ligand to facilitate targeting or delivery of the oligonucleotide to which it is attached to a particular cell type or tissue (e.g., to cells expressing integrin αvβ3 or αvβ6). In some embodiments, multiple integrin targeting ligands are linked to the oligonucleotide. In some embodiments, the oligonucleotide-integrin targeting ligand conjugates are selectively internalized by lung epithelial cells, either through receptor-mediated endocytosis or by other means.

[0080] Examples of targeting groups useful for delivering the oligonucleotide that include integrin targeting ligands may be based upon peptides or peptide mimics containing an arginine-glycine-aspartic acid (RGD) peptide. In some embodiments, the composition comprises an oligonucleotide that inhibits the expression of MST1, wherein the oligonucleotide comprises an RGD peptide. In some embodiments, the composition comprises an RGD peptide. In some embodiments, the composition comprises an RGD peptide derivative. In some embodiments, the RGD peptide is attached at a 3′ terminus of the oligonucleotide. In some embodiments, the RGD peptide is attached at a 5′ terminus of the oligonucleotide. In some embodiments, the composition comprises a sense strand, and the RGD peptide is attached to the sense strand (e.g. attached to a 5′ end of the sense strand, or attached to a 3′ end of the sense strand). In some embodiments, the composition comprises an antisense strand, and the RGD peptide is attached to the antisense strand (e.g. attached to a 5′ end of the antisense strand, or attached to a 3′ end of the antisense strand). In some embodiments, the composition comprises an RGD peptide attached at a 3′ or 5′ terminus of the oligonucleotide. In some embodiments, the oligonucleotide comprises an RGD peptide and a lipid attached at a 3′ or 5′ terminus of the oligonucleotide. The RGD peptide may be linear. The RGD peptide may be cyclic. An RGD peptide may include a D-amino acid. In some embodiments, the RGD peptide comprises Cyclo(-Arg-Gly-Asp-D-Phe-Cys) (SEQ ID NO: 6182). In some embodiments, the RGD peptide comprises Cyclo(-Arg-Gly-Asp-D-Phe-Lys) (SEQ ID NO: 6183). In some embodiments, the RGD peptide comprises Cyclo(-Arg-Gly-Asp-D-Phe-azido) (SEQ ID NO: 6184). In some embodiments, the RGD peptide comprises an amino benzoic acid derived RGD. In some embodiments, the RGD peptide comprises Cyclo(-Arg-Gly-Asp-D-Phe-Cys) (SEQ ID NO: 6182), Cyclo(-Arg-Gly-Asp-D-Phe-Lys) (SEQ ID NO: 6183), Cyclo(-Arg-Gly-Asp-D-Phe-azido) (SEQ ID NO: 6184), an amino benzoic acid derived RGD, or a combination thereof. In some embodiments, the RGD peptide comprises multiple of such RGD peptides. For example, the RGD peptide may include 2, 3, or 4 RGD peptides. Some embodiments include an arginine-glycine-glutamic acid peptide.

[0081] The oligonucleotide may include purines. Examples of purines include adenine (A) or guanine (G), or modified versions thereof. The oligonucleotide may include pyrimidines. Examples of pyrimidines include cytosine (C), thymine (T), or uracil (U), or modified versions thereof.

[0082] In some embodiments, purines of the oligonucleotide comprise 2′ fluoro modified purines. In some embodiments, purines of the oligonucleotide comprise 2′ methyl modified purines. In some embodiments, purines of the oligonucleotide comprise a mixture of 2′ fluoro and 2′ methyl modified purines. In some embodiments, all purines of the oligonucleotide comprise 2′ fluoro modified purines. In some embodiments, all purines of the oligonucleotide comprise 2′ methyl modified purines. In some embodiments, all purines of the oligonucleotide comprise a mixture of 2′ fluoro and 2′ methyl modified purines.

[0083] In some embodiments, pyrimidines of the oligonucleotide comprise 2′ fluoro modified pyrimidines. In some embodiments, pyrimidines of the oligonucleotide comprise 2′ methyl modified pyrimidines. In some embodiments, pyrimidines of the oligonucleotide comprise a mixture of 2′ fluoro and 2′ methyl modified pyrimidines. In some embodiments, all pyrimidines of the oligonucleotide comprise 2′ fluoro modified pyrimidines. In some embodiments, all pyrimidines of the oligonucleotide comprise 2′ methyl modified pyrimidines. In some embodiments, all pyrimidines of the oligonucleotide comprise a mixture of 2′ fluoro and 2′ methyl modified pyrimidines.

[0084] In some embodiments, purines of the oligonucleotide comprise 2′ fluoro modified purines, and pyrimidines of the oligonucleotide comprise a mixture of 2′ fluoro and 2′ methyl modified pyrimidines. In some embodiments, purines of the oligonucleotide comprise 2′ methyl modified purines, and pyrimidines of the oligonucleotide comprise a mixture of 2′ fluoro and 2′ methyl modified pyrimidines. In some embodiments, purines of the oligonucleotide comprise 2′ fluoro modified purines, and pyrimidines of the oligonucleotide comprise 2′ methyl modified pyrimidines. In some embodiments, purines of the oligonucleotide comprise 2′ methyl modified purines, and pyrimidines of the oligonucleotide comprise 2′ fluoro modified pyrimidines. In some embodiments, pyrimidines of the oligonucleotide comprise 2′ fluoro modified pyrimidines, and purines of the oligonucleotide comprise a mixture of 2′ fluoro and 2′ methyl modified purines. In some embodiments, pyrimidines of the oligonucleotide comprise 2′ methyl modified pyrimidines, and purines of the oligonucleotide comprise a mixture of 2′ fluoro and 2′ methyl modified purines. In some embodiments, pyrimidines of the oligonucleotide comprise 2′ fluoro modified pyrimidines, and purines of the oligonucleotide comprise 2′ methyl modified purines. In some embodiments, pyrimidines of the oligonucleotide comprise 2′ methyl modified pyrimidines, and purines of the oligonucleotide comprise 2′ fluoro modified purines.

[0085] In some embodiments, all purines of the oligonucleotide comprise 2′ fluoro modified purines, and all pyrimidines of the oligonucleotide comprise a mixture of 2′ fluoro and 2′ methyl modified pyrimidines. In some embodiments, all purines of the oligonucleotide comprise 2′ methyl modified purines, and all pyrimidines of the oligonucleotide comprise a mixture of 2′ fluoro and 2′ methyl modified pyrimidines. In some embodiments, all purines of the oligonucleotide comprise 2′ fluoro modified purines, and all pyrimidines of the oligonucleotide comprise 2′ methyl modified pyrimidines. In some embodiments, all purines of the oligonucleotide comprise 2′ methyl modified purines, and all pyrimidines of the oligonucleotide comprise 2′ fluoro modified pyrimidines. In some embodiments, all pyrimidines of the oligonucleotide comprise 2′ fluoro modified pyrimidines, and all purines of the oligonucleotide comprise a mixture of 2′ fluoro and 2′ methyl modified purines. In some embodiments, all pyrimidines of the oligonucleotide comprise 2′ methyl modified pyrimidines, and all purines of the oligonucleotide comprise a mixture of 2′ fluoro and 2′ methyl modified purines. In some embodiments, all pyrimidines of the oligonucleotide comprise 2′ fluoro modified pyrimidines, and all purines of the oligonucleotide comprise 2′ methyl modified purines. In some embodiments, all pyrimidines of the oligonucleotide comprise 2′ methyl modified pyrimidines, and all purines of the oligonucleotide comprise 2′ fluoro modified purines.

[0086] In some cases, the oligonucleotide comprises a particular modification pattern. In some embodiments, position 9 counting from the 5′ end of the of a strand of the oligonucleotide may have a 2′F modification. In some embodiments, when position 9 of a strand of the oligonucleotide is a pyrimidine, then all purines in a strand of the oligonucleotide have a 2′OMe modification. In some embodiments, when position 9 is the only pyrimidine between positions 5 and 11 of the sense stand, then position 9 is the only position with a 2′F modification in a strand of the oligonucleotide. In some embodiments, when position 9 and only one other base between positions 5 and 11 of a strand of the oligonucleotide are pyrimidines, then both of these pyrimidines are the only two positions with a 2′F modification in a strand of the oligonucleotide. In some embodiments, when position 9 and only two other bases between positions 5 and 11 of a strand of the oligonucleotide are pyrimidines, and those two other pyrimidines are in adjacent positions so that there would be not three 2′F modifications in a row, then any combination of 2′F modifications can be made that give three 2′F modifications in total. In some embodiments, when there are more than 2 pyrimidines between positions 5 and 11 of a strand of the oligonucleotide, then all combinations of pyrimidines having the 2′F modification are allowed that have three to five 2′F modifications in total, provided that a strand of the oligonucleotide does not have three 2′F modifications in a row. In some cases, a strand of the oligonucleotide of any of the siRNAs comprises a modification pattern which conforms to any or all of these a strand of the oligonucleotide rules.

[0087] In some embodiments, when position 9 of a strand of the oligonucleotide is a purine, then all purines in a strand of the oligonucleotide have a 2′OMe modification. In some embodiments, when position 9 is the only purine between positions 5 and 11 of the sense stand, then position 9 is the only position with a 2′F modification in a strand of the oligonucleotide. In some embodiments, when position 9 and only one other base between positions 5 and 11 of a strand of the oligonucleotide are purines, then both of these purines are the only two positions with a 2′F modification in a strand of the oligonucleotide. In some embodiments, when position 9 and only two other bases between positions 5 and 11 of a strand of the oligonucleotide are purines, and those two other purines are in adjacent positions so that there would be not three 2′F modifications in a row, then any combination of 2′F modifications can be made that give three 2′F modifications in total. In some embodiments, when there are more than 2 purines between positions 5 and 11 of a strand of the oligonucleotide, then all combinations of purines having the 2′F modification are allowed that have three to five 2′F modifications in total, provided that a strand of the oligonucleotide does not have three 2′F modifications in a row. In some cases, a strand of the oligonucleotide of any of the siRNAs comprises a modification pattern which conforms to any or all of these a strand of the oligonucleotide rules.

[0088] In some cases, position 9 of a strand of the oligonucleotide can be a 2′deoxy. In these cases, 2′F and 2′OMe modifications may occur at the other positions of a strand of the oligonucleotide. In some cases, a strand of the oligonucleotide of any of the siRNAs comprises a modification pattern which conforms to these a strand of the oligonucleotide rules.

[0089] In some embodiments, position nine of the sense strand comprises a 2′ fluoro-modified pyrimidine. In some embodiments, all purines of the sense strand comprise 2′-O-methyl modified purines. In some embodiments, 1, 2, 3, 4, or 5 pyrimidines between positions 5 and 11 comprise a 2′flouro-modified pyrimidine, provided there are not three 2′ fluoro-modified pyrimidines in a row. In some embodiments, the odd-numbered positions of the antisense strand comprise 2′-O-methyl modified nucleotides. In some embodiments, the even-numbered positions of the antisense strand comprise 2′flouro-modified nucleotides and unmodified deoxyribonucleotide. In some embodiments, the even-numbered positions of the antisense strand comprise 2′flouro-modified nucleotides, 2′-O-methyl modified nucleotides and unmodified deoxyribonucleotide. In some embodiments, position nine of the sense strand comprises a 2′ fluoro-modified pyrimidine; all purines of the sense strand comprises 2′-O-methyl modified purines; 1, 2, 3, 4, or 5 pyrimidines between positions 5 and 11 comprise a 2′flouro-modified pyrimidine, provided there are not three 2′ fluoro-modified pyrimidines in a row; the odd-numbered positions of the antisense strand comprise 2′-O-methyl modified nucleotides; and the even-numbered positions of the antisense strand comprise 2′flouro-modified nucleotides and unmodified deoxyribonucleotides.

[0090] In some embodiments, position nine of the sense strand comprises a 2′ fluoro-modified purine. In some embodiments, all pyrimidines of the sense strand comprise 2′-O-methyl modified purines. In some embodiments, 1, 2, 3, 4, or 5 purines between positions 5 and 11 comprise a 2′flouro-modified purine, provided there are not three 2′ fluoro-modified purine in a row. In some embodiments, the odd-numbered positions of the antisense strand comprise 2′-O-methyl modified nucleotides. In some embodiments, the even-numbered positions of the antisense strand comprise 2′flouro-modified nucleotides and unmodified deoxyribonucleotide. In some embodiments, the even-numbered positions of the antisense strand comprise 2′flouro-modified nucleotides, 2′-O-methyl modified nucleotides and unmodified deoxyribonucleotide. In some embodiments, position nine of the sense strand comprises a 2′ fluoro-modified purine; all pyrimidine of the sense strand comprises 2′-O-methyl modified pyrimidines; 1, 2, 3, 4, or 5 purines between positions 5 and 11 comprise a 2′flouro-modified purines, provided there are not three 2′ fluoro-modified purines in a row; the odd-numbered positions of the antisense strand comprise 2′-O-methyl modified nucleotides; and the even-numbered positions of the antisense strand comprise 2′flouro-modified nucleotides and unmodified deoxyribonucleotides. In some embodiments, there are not three 2′ fluoro-modified purines in a row. In some embodiments, there are not three 2′ fluoro-modified pyrimidines in a row.

[0091] In some embodiments, position nine of the sense strand comprises an unmodified deoxyribonucleotide. In some embodiments, positions 5, 7, and 8 of the sense strand comprise 2′fluoro-modified nucleotides. In some embodiments, all pyrimidines in positions 10 to 21 of the sense strand comprise 2′-O-methyl modified pyrimidines and all purines in positions 10 to 21 of the comprise 2′-O-methyl modified purines or 2′fluoro-modified purines. In some embodiments, the odd-numbered positions of the antisense strand comprise 2′-O-methyl modified nucleotides. In some embodiments, the even-numbered positions of the antisense strand comprise 2′flouro-modified nucleotides and unmodified deoxyribonucleotides. In some embodiments, the even-numbered positions of the antisense strand comprise 2′flouro-modified nucleotides, 2′-O-methyl modified nucleotides and unmodified deoxyribonucleotides. In some embodiments, position nine of the sense strand comprises an unmodified deoxyribonucleotide; positions 5, 7, and 8 of the sense strand comprise 2′fluoro-modified nucleotides; all pyrimidines in positions 10 to 21 of the sense strand comprise 2′-O-methyl modified pyrimidines and all purines in positions 10 to 21 of the comprise 2′-O-methyl modified purines or 2′fluoro-modified purines; the odd-numbered positions of the antisense strand comprise 2′-O-methyl modified nucleotides; and the even-numbered positions of the antisense strand comprise 2′flouro-modified nucleotides and unmodified deoxyribonucleotides.

[0092] In some embodiments, position nine of the sense strand comprises an unmodified deoxyribonucleotide. In some embodiments, positions 5, 7, and 8 of the sense strand comprise 2′fluoro-modified nucleotides. In some embodiments, all purines in positions 10 to 21 of the sense strand comprise 2′-O-methyl modified purines and all pyrimidines in positions 10 to 21 of the comprise 2′-O-methyl modified pyrimidines or 2′fluoro-modified pyrimidines. In some embodiments, the odd-numbered positions of the antisense strand comprise 2′-O-methyl modified nucleotides. In some embodiments, the even-numbered positions of the antisense strand comprise 2′flouro-modified nucleotides and unmodified deoxyribonucleotides. In some embodiments, the even-numbered positions of the antisense strand comprise 2′flouro-modified nucleotides, 2′-O-methyl modified nucleotides and unmodified deoxyribonucleotides. In some embodiments, position nine of the sense strand comprises an unmodified deoxyribonucleotide; positions 5, 7, and 8 of the sense strand comprise 2′fluoro-modified nucleotides; all purines in positions 10 to 21 of the sense strand comprise 2′-O-methyl modified purines and all pyrimidines in positions 10 to 21 of the comprise 2′-O-methyl modified pyrimidines or 2′fluoro-modified pyrimidines; the odd-numbered positions of the antisense strand comprise 2′-O-methyl modified nucleotides; and the even-numbered positions of the antisense strand comprise 2′flouro-modified nucleotides and unmodified deoxyribonucleotide.

[0093] In some embodiments, the moiety includes a negatively charged group attached at a 5′ end of the oligonucleotide. This may be referred to as a 5′-end group. In some embodiments, the negatively charged group is attached at a 5′ end of an antisense strand of an siRNA disclosed herein. The 5′-end group may be or include a 5′-end phosphorothioate, 5′-end phosphorodithioate, 5′-end vinylphosphonate (5′-VP), 5′-end methylphosphonate, 5′-end cyclopropyl phosphonate, or a 5′-deoxy-5′-C-malonyl. The 5′-end group may comprise 5′-VP. In some embodiments, the 5′-VP comprises a trans-vinylphosphate or cis-vinylphosphate. The 5′-end group may include an extra 5′ phosphate. A combination of 5′-end groups may be used.

[0094] In some embodiments, the oligonucleotide includes a negatively charged group. The negatively charged group may aid in cell or tissue penetration. The negatively charged group may be attached at a 5′ or 3′ end (e.g. a 5′ end) of the oligonucleotide. This may be referred to as an end group. The end group may be or include a phosphorothioate, phosphorodithioate, vinylphosphonate, methylphosphonate, cyclopropyl phosphonate, or a deoxy-C-malonyl. The end group may include an extra 5′ phosphate such as an extra 5′ phosphate. A combination of end groups may be used.

[0095] In some embodiments, the oligonucleotide includes a phosphate mimic. In some embodiments, the phosphate mimic comprises vinyl phosphonate. In some embodiments, the vinyl phosphonate comprises a trans-vinylphosphate. In some embodiments, the vinyl phosphonate comprises a cis-vinylphosphate. An example of a nucleotide that includes a vinyl phosphonate is shown below.

[chemical structure]

[0096] In some embodiments, the vinyl phosphonate increases the stability of the oligonucleotide. In some embodiments, the vinyl phosphonate increases the accumulation of the oligonucleotide in tissues. In some embodiments, the vinyl phosphonate protects the oligonucleotide from an exonuclease or a phosphatase. In some embodiments, the vinyl phosphonate improves the binding affinity of the oligonucleotide with the siRNA processing machinery.

[0097] In some embodiments, the oligonucleotide includes 1 vinyl phosphonate. In some embodiments, the oligonucleotide includes 2 vinyl phosphonates. In some embodiments, the oligonucleotide includes 3 vinyl phosphonates. In some embodiments, the oligonucleotide includes 4 vinyl phosphonates. In some embodiments, the antisense strand of the oligonucleotide comprises a vinyl phosphonate at the 5′ end. In some embodiments, the antisense strand of the oligonucleotide comprises a vinyl phosphonate at the 3′ end. In some embodiments, the sense strand of the oligonucleotide comprises a vinyl phosphonate at the 5′ end. In some embodiments, the sense strand of the oligonucleotide comprises a vinyl phosphonate at the 3′ end.

[0098] In some embodiments, the composition comprises an oligonucleotide that inhibits the expression of MST1, wherein the oligonucleotide comprises an siRNA comprising a sense strand and an antisense strand, wherein the sense strand comprises a nucleoside sequence comprising or consisting of the sequence of any one of SEQ ID NOs: 6049-6086, 6125-6162, or 6186-6242, or a nucleic acid sequence thereof having 1 or 2 nucleoside substitutions, additions, or deletions. In some embodiments, the sense strand comprises a nucleoside sequence comprising or consisting of the sequence of any one of SEQ ID NOs: 6049-6086, 6125-6162, or 6186-6242, or a nucleic acid sequence thereof having 3 or 4 nucleoside substitutions, additions, or deletions. In some embodiments, the sense strand further comprises a 3′ overhang. In some embodiments, the 3′ overhang comprises 1, 2, 3, 4, 5, 6, 7, 8, 9, or 10 nucleosides, or a range of nucleotides defined by any two of the aforementioned numbers. In some embodiments, the 3′ overhang comprises 1, 2, or more nucleosides. In some embodiments, the 3′ overhang comprises 2 nucleosides. In some embodiments, the sense strand further comprises a 5′ overhang. In some embodiments, the 5′ overhang comprises 1, 2, 3, 4, 5, 6, 7, 8, 9, or 10 nucleosides, or a range of nucleotides defined by any two of the aforementioned numbers. In some embodiments, the 5′ overhang comprises 1, 2, or more nucleosides. In some embodiments, the 5′ overhang comprises 2 nucleosides. In some embodiments, the sense strand comprises a nucleoside sequence comprising or consisting of the sequence of any one of SEQ ID NOs: 6049-6086, 6125-6162, or 6186-6242, or a nucleic acid sequence thereof having 1 or 2 nucleoside additions at the 3′ end. In some embodiments, the composition comprises an oligonucleotide that inhibits the expression of MST1, wherein the oligonucleotide comprises an siRNA comprising a sense strand and an antisense strand, wherein the sense strand comprises a nucleoside sequence comprising or consisting of the sequence of any one of SEQ ID NOs: 6049-6086, 6125-6162, or 6186-6242. The sense strand or antisense strand may comprise any modifications described herein. The sense strand or antisense strand may comprise a lipid moiety or a GalNAc moiety.

[0099] In some embodiments, the composition comprises an oligonucleotide that inhibits the expression of MST1, wherein the oligonucleotide comprises an siRNA comprising a sense strand and an antisense strand, wherein the antisense strand comprises a nucleoside sequence comprising or consisting of the sequence of any one of SEQ ID NOs: 6087-6124 or 6253-6309, or a nucleic acid sequence thereof having 1 or 2 nucleoside substitutions, additions, or deletions. In some embodiments, the antisense strand sequence comprises a nucleoside sequence comprising or consisting of the sequence of any one of SEQ ID NOs: 6087-6124 or 6253-6309, or a nucleic acid sequence thereof having 3 or 4 nucleoside substitutions, additions, or deletions. In some embodiments, the antisense strand further comprises a 3′ overhang. In some embodiments, the 3′ overhang comprises 1, 2, 3, 4, 5, 6, 7, 8, 9, or 10 nucleosides, or a range of nucleotides defined by any two of the aforementioned numbers. In some embodiments, the 3′ overhang comprises 1, 2, or more nucleosides. In some embodiments, the 3′ overhang comprises 2 nucleosides. In some embodiments, the antisense strand further comprises a 5′ overhang. In some embodiments, the 5′ overhang comprises 1, 2, 3, 4, 5, 6, 7, 8, 9, or 10 nucleosides, or a range of nucleotides defined by any two of the aforementioned numbers. In some embodiments, the 5′ overhang comprises 1, 2, or more nucleosides. In some embodiments, the 5′ overhang comprises 2 nucleosides. In some embodiments, the antisense strand comprises a nucleoside sequence comprising or consisting of the sequence of any one of SEQ ID NOs: 6087-6124 or 6253-6309, or a nucleic acid sequence thereof having 1 or 2 nucleoside additions at the 3′ end. In some embodiments, the composition comprises an oligonucleotide that inhibits the expression of MST1, wherein the oligonucleotide comprises an siRNA comprising a sense strand and an antisense strand, wherein the antisense strand comprises a nucleoside sequence comprising or consisting of the sequence of any one of SEQ ID NOs: 6087-6124 or 6253-6309. The sense strand or antisense strand may comprise any modifications described herein. The sense strand or antisense strand may comprise a lipid moiety or a GalNAc moiety.

[0100] In some embodiments, the siRNA comprises a sense strand having a sequence in accordance with any of SEQ ID NOs: 6206, 6212, 6213, 6214, 6227, 6232, 6236, or 6242. In some embodiments, the sense strand sequence comprises or consists of sequence at least 75% identical to any one of SEQ ID NOs: 6206, 6212, 6213, 6214, 6227, 6232, 6236, or 6242, at least 80% identical to any one of SEQ ID NOs: 6206, 6212, 6213, 6214, 6227, 6232, 6236, or 6242, at least 85% identical to of any one of SEQ ID NOs: 6206, 6212, 6213, 6214, 6227, 6232, 6236, or 6242, at least 90% identical to any one of SEQ ID NOs: 6206, 6212, 6213, 6214, 6227, 6232, 6236, or 6242, or at least 95% identical to any one of SEQ ID NOs: 6206, 6212, 6213, 6214, 6227, 6232, 6236, or 6242. In some embodiments, the sense strand sequence comprises or consists of the sequence of any one of SEQ ID NOs 6206, 6212, 6213, 6214, 6227, 6232, 6236, or 6242, or a sense strand sequence thereof having 1, 2, 3, or 4 nucleoside substitutions, additions, or deletions. In some embodiments, the sense strand sequence comprises or consists of the sequence of any one of SEQ ID NOs: 6206, 6212, 6213, 6214, 6227, 6232, 6236, or 6242, or a sense strand sequence thereof having 1 or 2 nucleoside substitutions, additions, or deletions. In some embodiments, the sense strand sequence comprises or consists of a sequence 100% identical to SEQ ID NOs: 6206, 6212, 6213, 6214, 6227, 6232, 6236, or 6242. The sense strand sequence may include the first 5, 6, 7, 8, 9, 10, 11, 12, 13, 14, 15, 16, 17, 18, or 19 nucleotides (in the 5′ to 3′ direction) of any of the aforementioned sequences. The sense strand sequence may include the last 5, 6, 7, 8, 9, 10, 11, 12, 13, 14, 15, 16, 17, 18, or 19 nucleotides (in the 5′ to 3′ direction) of any of the aforementioned sequences. The sense strand may comprise a modification pattern described herein. The sense strand may comprise an overhang. The sense strand may comprise a lipid moiety. The sense strand may comprise a GalNAc moiety.

[0101] In some embodiments, the siRNA comprises an antisense strand having a sequence in accordance with any of SEQ ID NOs: 6273, 6279, 6280, 6281, 6294, 6299, 6303, or 6309. In some embodiments, the antisense strand sequence comprises or consists of sequence at least 75% identical to any one of SEQ ID NOs: 6273, 6279, 6280, 6281, 6294, 6299, 6303, or 6309, at least 80% identical to any one of SEQ ID NOs: 6273, 6279, 6280, 6281, 6294, 6299, 6303, or 6309, at least 85% identical to of any one of SEQ ID NOs: 6273, 6279, 6280, 6281, 6294, 6299, 6303, or 6309, at least 90% identical to any one of SEQ ID NOs: 6273, 6279, 6280, 6281, 6294, 6299, 6303, or 6309, or at least 95% identical to any one of SEQ ID NOs: 6273, 6279, 6280, 6281, 6294, 6299, 6303, or 6309. In some embodiments, the antisense strand sequence comprises or consists of the sequence of any one of SEQ ID NOs: 6273, 6279, 6280, 6281, 6294, 6299, 6303, or 6309, or an antisense strand sequence thereof having 1, 2, 3, or 4 nucleoside substitutions, additions, or deletions. In some embodiments, the antisense strand sequence comprises or consists of the sequence of any one of SEQ ID NOs: 6273, 6279, 6280, 6281, 6294, 6299, 6303, or 6309, or an antisense strand sequence thereof having 1 or 2 nucleoside substitutions, additions, or deletions. In some embodiments, the antisense strand sequence comprises or consists of a sequence 100% identical to SEQ ID NOs: 6273, 6279, 6280, 6281, 6294, 6299, 6303, or 6309. The antisense strand sequence may include the first 5, 6, 7, 8, 9, 10, 11, 12, 13, 14, 15, 16, 17, 18, or 19 nucleotides (in the 5′ to 3′ direction) of any of the aforementioned sequences. The antisense strand sequence may include the last 5, 6, 7, 8, 9, 10, 11, 12, 13, 14, 15, 16, 17, 18, or 19 nucleotides (in the 5′ to 3′ direction) of any of the aforementioned sequences. The antisense strand may comprise an overhang. The antisense strand may comprise a modification pattern described herein. The antisense strand may comprise a lipid moiety or a GalNAc moiety.

[0102] In some embodiments, the siRNA comprises a sense strand having a sequence in accordance with SEQ ID NO: 6206. In some embodiments, the sense strand sequence comprises or consists of sequence at least 75% identical to SEQ ID NO: 6206, at least 80% identical to SEQ ID NO: 6206, at least 85% identical to SEQ ID NO: 6206, at least 90% identical to SEQ ID NO: 6206, or at least 95% identical to SEQ ID NO: 6206. In some embodiments, the sense strand sequence comprises or consists of the sequence of SEQ ID NO 6206, or a sense strand sequence thereof having 1, 2, 3, or 4 nucleoside substitutions, additions, or deletions. In some embodiments, the sense strand sequence comprises or consists of the sequence of SEQ ID NO: 6206, or a sense strand sequence thereof having 1 or 2 nucleoside substitutions, additions, or deletions. In some embodiments, the sense strand sequence comprises or consists of a sequence 100% identical to SEQ ID NO: 6206. The sense strand may comprise a modification pattern described herein. The sense strand may comprise an overhang. The sense strand may comprise a lipid moiety. The sense strand may comprise a GalNAc moiety.

[0103] In some embodiments, the siRNA comprises a sense strand having a sequence in accordance with SEQ ID NO: 6212. In some embodiments, the sense strand sequence comprises or consists of sequence at least 75% identical to SEQ ID NO: 6212, at least 80% identical to SEQ ID NO: 6212, at least 85% identical to SEQ ID NO: 6212, at least 90% identical to SEQ ID NO: 6212, or at least 95% identical to SEQ ID NO: 6212. In some embodiments, the sense strand sequence comprises or consists of the sequence of SEQ ID NO 6212, or a sense strand sequence thereof having 1, 2, 3, or 4 nucleoside substitutions, additions, or deletions. In some embodiments, the sense strand sequence comprises or consists of the sequence of SEQ ID NO: 6212, or a sense strand sequence thereof having 1 or 2 nucleoside substitutions, additions, or deletions. In some embodiments, the sense strand sequence comprises or consists of a sequence 100% identical to SEQ ID NO: 6212. The sense strand may comprise a modification pattern described herein. The sense strand may comprise an overhang. The sense strand may comprise a lipid moiety. The sense strand may comprise a GalNAc moiety.

[0104] In some embodiments, the siRNA comprises a sense strand having a sequence in accordance with SEQ ID NO: 6213. In some embodiments, the sense strand sequence comprises or consists of sequence at least 75% identical to SEQ ID NO: 6213, at least 80% identical to SEQ ID NO: 6213, at least 85% identical to SEQ ID NO: 6213, at least 90% identical to SEQ ID NO: 6213, or at least 95% identical to SEQ ID NO: 6213. In some embodiments, the sense strand sequence comprises or consists of the sequence of SEQ ID NO 6213, or a sense strand sequence thereof having 1, 2, 3, or 4 nucleoside substitutions, additions, or deletions. In some embodiments, the sense strand sequence comprises or consists of the sequence of SEQ ID NO: 6213, or a sense strand sequence thereof having 1 or 2 nucleoside substitutions, additions, or deletions. In some embodiments, the sense strand sequence comprises or consists of a sequence 100% identical to SEQ ID NO: 6213. The sense strand may comprise a modification pattern described herein. The sense strand may comprise an overhang. The sense strand may comprise a lipid moiety. The sense strand may comprise a GalNAc moiety.

[0105] In some embodiments, the siRNA comprises a sense strand having a sequence in accordance with SEQ ID NO: 6214. In some embodiments, the sense strand sequence comprises or consists of sequence at least 75% identical to SEQ ID NO: 6214, at least 80% identical to SEQ ID NO: 6214, at least 85% identical to SEQ ID NO: 6214, at least 90% identical to SEQ ID NO: 6214, or at least 95% identical to SEQ ID NO: 6214. In some embodiments, the sense strand sequence comprises or consists of the sequence of SEQ ID NO 6214, or a sense strand sequence thereof having 1, 2, 3, or 4 nucleoside substitutions, additions, or deletions. In some embodiments, the sense strand sequence comprises or consists of the sequence of SEQ ID NO: 6214, or a sense strand sequence thereof having 1 or 2 nucleoside substitutions, additions, or deletions. In some embodiments, the sense strand sequence comprises or consists of a sequence 100% identical to SEQ ID NO: 6214. The sense strand may comprise a modification pattern described herein. The sense strand may comprise an overhang. The sense strand may comprise a lipid moiety. The sense strand may comprise a GalNAc moiety.

[0106] In some embodiments, the siRNA comprises a sense strand having a sequence in accordance with SEQ ID NO: 6227. In some embodiments, the sense strand sequence comprises or consists of sequence at least 75% identical to SEQ ID NO: 6227, at least 80% identical to SEQ ID NO: 6227, at least 85% identical to SEQ ID NO: 6227, at least 90% identical to SEQ ID NO: 6227, or at least 95% identical to SEQ ID NO: 6227. In some embodiments, the sense strand sequence comprises or consists of the sequence of SEQ ID NO 6227, or a sense strand sequence thereof having 1, 2, 3, or 4 nucleoside substitutions, additions, or deletions. In some embodiments, the sense strand sequence comprises or consists of the sequence of SEQ ID NO: 6227, or a sense strand sequence thereof having 1 or 2 nucleoside substitutions, additions, or deletions. In some embodiments, the sense strand sequence comprises or consists of a sequence 100% identical to SEQ ID NO: 6227. The sense strand may comprise a modification pattern described herein. The sense strand may comprise an overhang. The sense strand may comprise a lipid moiety. The sense strand may comprise a GalNAc moiety.

[0107] In some embodiments, the siRNA comprises a sense strand having a sequence in accordance with SEQ ID NO: 6232. In some embodiments, the sense strand sequence comprises or consists of sequence at least 75% identical to SEQ ID NO: 6232, at least 80% identical to SEQ ID NO: 6232, at least 85% identical to SEQ ID NO: 6232, at least 90% identical to SEQ ID NO: 6232, or at least 95% identical to SEQ ID NO: 6232. In some embodiments, the sense strand sequence comprises or consists of the sequence of SEQ ID NO 6232, or a sense strand sequence thereof having 1, 2, 3, or 4 nucleoside substitutions, additions, or deletions. In some embodiments, the sense strand sequence comprises or consists of the sequence of SEQ ID NO: 6232, or a sense strand sequence thereof having 1 or 2 nucleoside substitutions, additions, or deletions. In some embodiments, the sense strand sequence comprises or consists of a sequence 100% identical to SEQ ID NO: 6232. The sense strand may comprise a modification pattern described herein. The sense strand may comprise an overhang. The sense strand may comprise a lipid moiety. The sense strand may comprise a GalNAc moiety.

[0108] In some embodiments, the siRNA comprises a sense strand having a sequence in accordance with SEQ ID NO: 6236. In some embodiments, the sense strand sequence comprises or consists of sequence at least 75% identical to SEQ ID NO: 6236, at least 80% identical to SEQ ID NO: 6236, at least 85% identical to SEQ ID NO: 6236, at least 90% identical to SEQ ID NO: 6236, or at least 95% identical to SEQ ID NO: 6236. In some embodiments, the sense strand sequence comprises or consists of the sequence of SEQ ID NO 6236, or a sense strand sequence thereof having 1, 2, 3, or 4 nucleoside substitutions, additions, or deletions. In some embodiments, the sense strand sequence comprises or consists of the sequence of SEQ ID NO: 6236, or a sense strand sequence thereof having 1 or 2 nucleoside substitutions, additions, or deletions. In some embodiments, the sense strand sequence comprises or consists of a sequence 100% identical to SEQ ID NO: 6236. The sense strand may comprise a modification pattern described herein. The sense strand may comprise an overhang. The sense strand may comprise a lipid moiety. The sense strand may comprise a GalNAc moiety.

[0109] In some embodiments, the siRNA comprises a sense strand having a sequence in accordance with SEQ ID NO: 6242. In some embodiments, the sense strand sequence comprises or consists of sequence at least 75% identical to SEQ ID NO: 6242, at least 80% identical to SEQ ID NO: 6242, at least 85% identical to SEQ ID NO: 6242, at least 90% identical to SEQ ID NO: 6242, or at least 95% identical to SEQ ID NO: 6242. In some embodiments, the sense strand sequence comprises or consists of the sequence of SEQ ID NO 6242, or a sense strand sequence thereof having 1, 2, 3, or 4 nucleoside substitutions, additions, or deletions. In some embodiments, the sense strand sequence comprises or consists of the sequence of SEQ ID NO: 6242, or a sense strand sequence thereof having 1 or 2 nucleoside substitutions, additions, or deletions. In some embodiments, the sense strand sequence comprises or consists of a sequence 100% identical to SEQ ID NO: 6242. The sense strand may comprise a modification pattern described herein. The sense strand may comprise an overhang. The sense strand may comprise a lipid moiety. The sense strand may comprise a GalNAc moiety.

[0110] In some embodiments, the siRNA comprises an antisense strand having a sequence in accordance with SEQ ID NO: 6273. In some embodiments, the antisense strand sequence comprises or consists of sequence at least 75% identical to SEQ ID NO: 6273, at least 80% identical to SEQ ID NO: 6273, at least 85% identical to SEQ ID NO: 6273, at least 90% identical to SEQ ID NO: 6273, or at least 95% identical to SEQ ID NO: 6273. In some embodiments, the antisense strand sequence comprises or consists of the sequence of SEQ ID NO 6273, or an antisense strand sequence thereof having 1, 2, 3, or 4 nucleoside substitutions, additions, or deletions. In some embodiments, the antisense strand sequence comprises or consists of the sequence of SEQ ID NO: 6273, or an antisense strand sequence thereof having 1 or 2 nucleoside substitutions, additions, or deletions. In some embodiments, the antisense strand sequence comprises or consists of a sequence 100% identical to SEQ ID NO: 6273. The antisense strand may comprise a modification pattern described herein. The antisense strand may comprise an overhang. The antisense strand may comprise a lipid moiety. The antisense strand may comprise a GalNAc moiety.

[0111] In some embodiments, the siRNA comprises an antisense strand having a sequence in accordance with SEQ ID NO: 6279. In some embodiments, the antisense strand sequence comprises or consists of sequence at least 75% identical to SEQ ID NO: 6279, at least 80% identical to SEQ ID NO: 6279, at least 85% identical to SEQ ID NO: 6279, at least 90% identical to SEQ ID NO: 6279, or at least 95% identical to SEQ ID NO: 6279. In some embodiments, the antisense strand sequence comprises or consists of the sequence of SEQ ID NO 6279, or an antisense strand sequence thereof having 1, 2, 3, or 4 nucleoside substitutions, additions, or deletions. In some embodiments, the antisense strand sequence comprises or consists of the sequence of SEQ ID NO: 6279, or an antisense strand sequence thereof having 1 or 2 nucleoside substitutions, additions, or deletions. In some embodiments, the antisense strand sequence comprises or consists of a sequence 100% identical to SEQ ID NO: 6279. The antisense strand may comprise a modification pattern described herein. The antisense strand may comprise an overhang. The antisense strand may comprise a lipid moiety. The antisense strand may comprise a GalNAc moiety.

[0112] In some embodiments, the siRNA comprises an antisense strand having a sequence in accordance with SEQ ID NO: 6280. In some embodiments, the antisense strand sequence comprises or consists of sequence at least 75% identical to SEQ ID NO: 6280, at least 80% identical to SEQ ID NO: 6280, at least 85% identical to SEQ ID NO: 6280, at least 90% identical to SEQ ID NO: 6280, or at least 95% identical to SEQ ID NO: 6280. In some embodiments, the antisense strand sequence comprises or consists of the sequence of SEQ ID NO 6280, or an antisense strand sequence thereof having 1, 2, 3, or 4 nucleoside substitutions, additions, or deletions. In some embodiments, the antisense strand sequence comprises or consists of the sequence of SEQ ID NO: 6280, or an antisense strand sequence thereof having 1 or 2 nucleoside substitutions, additions, or deletions. In some embodiments, the antisense strand sequence comprises or consists of a sequence 100% identical to SEQ ID NO: 6280. The antisense strand may comprise a modification pattern described herein. The antisense strand may comprise an overhang. The antisense strand may comprise a lipid moiety. The antisense strand may comprise a GalNAc moiety.

[0113] In some embodiments, the siRNA comprises an antisense strand having a sequence in accordance with SEQ ID NO: 6281. In some embodiments, the antisense strand sequence comprises or consists of sequence at least 75% identical to SEQ ID NO: 6281, at least 80% identical to SEQ ID NO: 6281, at least 85% identical to SEQ ID NO: 6281, at least 90% identical to SEQ ID NO: 6281, or at least 95% identical to SEQ ID NO: 6281. In some embodiments, the antisense strand sequence comprises or consists of the sequence of SEQ ID NO 6281, or an antisense strand sequence thereof having 1, 2, 3, or 4 nucleoside substitutions, additions, or deletions. In some embodiments, the antisense strand sequence comprises or consists of the sequence of SEQ ID NO: 6281, or an antisense strand sequence thereof having 1 or 2 nucleoside substitutions, additions, or deletions. In some embodiments, the antisense strand sequence comprises or consists of a sequence 100% identical to SEQ ID NO: 6281. The antisense strand may comprise a modification pattern described herein. The antisense strand may comprise an overhang. The antisense strand may comprise a lipid moiety. The antisense strand may comprise a GalNAc moiety.

[0114] In some embodiments, the siRNA comprises an antisense strand having a sequence in accordance with SEQ ID NO: 6294. In some embodiments, the antisense strand sequence comprises or consists of sequence at least 75% identical to SEQ ID NO: 6294, at least 80% identical to SEQ ID NO: 6294, at least 85% identical to SEQ ID NO: 6294, at least 90% identical to SEQ ID NO: 6294, or at least 95% identical to SEQ ID NO: 6294. In some embodiments, the antisense strand sequence comprises or consists of the sequence of SEQ ID NO 6294, or an antisense strand sequence thereof having 1, 2, 3, or 4 nucleoside substitutions, additions, or deletions. In some embodiments, the antisense strand sequence comprises or consists of the sequence of SEQ ID NO: 6294, or an antisense strand sequence thereof having 1 or 2 nucleoside substitutions, additions, or deletions. In some embodiments, the antisense strand sequence comprises or consists of a sequence 100% identical to SEQ ID NO: 6294. The antisense strand may comprise a modification pattern described herein. The antisense strand may comprise an overhang. The antisense strand may comprise a lipid moiety. The antisense strand may comprise a GalNAc moiety.

[0115] In some embodiments, the siRNA comprises an antisense strand having a sequence in accordance with SEQ ID NO: 6299. In some embodiments, the antisense strand sequence comprises or consists of sequence at least 75% identical to SEQ ID NO: 6299, at least 80% identical to SEQ ID NO: 6299, at least 85% identical to SEQ ID NO: 6299, at least 90% identical to SEQ ID NO: 6299, or at least 95% identical to SEQ ID NO: 6299. In some embodiments, the antisense strand sequence comprises or consists of the sequence of SEQ ID NO 6299, or an antisense strand sequence thereof having 1, 2, 3, or 4 nucleoside substitutions, additions, or deletions. In some embodiments, the antisense strand sequence comprises or consists of the sequence of SEQ ID NO: 6299, or an antisense strand sequence thereof having 1 or 2 nucleoside substitutions, additions, or deletions. In some embodiments, the antisense strand sequence comprises or consists of a sequence 100% identical to SEQ ID NO: 6299. The antisense strand may comprise a modification pattern described herein. The antisense strand may comprise an overhang. The antisense strand may comprise a lipid moiety. The antisense strand may comprise a GalNAc moiety.

[0116] In some embodiments, the siRNA comprises an antisense strand having a sequence in accordance with SEQ ID NO: 6303. In some embodiments, the antisense strand sequence comprises or consists of sequence at least 75% identical to SEQ ID NO: 6303, at least 80% identical to SEQ ID NO: 6303, at least 85% identical to SEQ ID NO: 6303, at least 90% identical to SEQ ID NO: 6303, or at least 95% identical to SEQ ID NO: 6303. In some embodiments, the antisense strand sequence comprises or consists of the sequence of SEQ ID NO 6303, or an antisense strand sequence thereof having 1, 2, 3, or 4 nucleoside substitutions, additions, or deletions. In some embodiments, the antisense strand sequence comprises or consists of the sequence of SEQ ID NO: 6303, or an antisense strand sequence thereof having 1 or 2 nucleoside substitutions, additions, or deletions. In some embodiments, the antisense strand sequence comprises or consists of a sequence 100% identical to SEQ ID NO: 6303. The antisense strand may comprise a modification pattern described herein. The antisense strand may comprise an overhang. The antisense strand may comprise a lipid moiety. The antisense strand may comprise a GalNAc moiety.

[0117] In some embodiments, the siRNA comprises an antisense strand having a sequence in accordance with SEQ ID NO: 6309. In some embodiments, the antisense strand sequence comprises or consists of sequence at least 75% identical to SEQ ID NO: 6309, at least 80% identical to SEQ ID NO: 6309, at least 85% identical to SEQ ID NO: 6309, at least 90% identical to SEQ ID NO: 6309, or at least 95% identical to SEQ ID NO: 6309. In some embodiments, the antisense strand sequence comprises or consists of the sequence of SEQ ID NO 6309, or an antisense strand sequence thereof having 1, 2, 3, or 4 nucleoside substitutions, additions, or deletions. In some embodiments, the antisense strand sequence comprises or consists of the sequence of SEQ ID NO: 6309, or an antisense strand sequence thereof having 1 or 2 nucleoside substitutions, additions, or deletions. In some embodiments, the antisense strand sequence comprises or consists of a sequence 100% identical to SEQ ID NO: 6309. The antisense strand may comprise a modification pattern described herein. The antisense strand may comprise an overhang. The antisense strand may comprise a lipid moiety. The antisense strand may comprise a GalNAc moiety.

### 1. Hydrophobic Moieties

[0118] In some embodiments, the composition comprises an oligonucleotide that inhibits the expression of MST1, wherein the oligonucleotide comprises a hydrophobic moiety. The hydrophobic moiety may be attached at a 3′ or 5′ terminus of the oligonucleotide. The hydrophobic moiety may include a lipid such as a fatty acid. The hydrophobic moiety may include a hydrocarbon. The hydrocarbon may be linear. The hydrocarbon may be non-linear. The hydrophobic moiety may include a lipid moiety or a cholesterol moiety, or a combination thereof.

[0119] In some embodiments, the composition comprises an oligonucleotide that inhibits the expression of MST1, wherein the oligonucleotide comprises a lipid attached at a 3′ or 5′ terminus of the oligonucleotide. In some embodiments, the lipid comprises cholesterol, myristoyl, palmitoyl, stearoyl, lithocholoyl, docosanoyl, docosahexaenoyl, myristyl, palmityl, stearyl, or α-tocopherol, or a combination thereof.

[0120] In some embodiments, the composition comprises an oligonucleotide that inhibits the expression of MST1, wherein the oligonucleotide comprises a hydrophobic ligand or moiety. In some embodiments, the hydrophobic ligand or moiety comprises cholesterol. In some embodiments, the hydrophobic ligand or moiety comprises a cholesterol derivative. In some embodiments, the hydrophobic ligand or moiety is attached at a 3′ terminus of the oligonucleotide. In some embodiments, the hydrophobic ligand or moiety s attached at a 5′ terminus of the oligonucleotide. In some embodiments, the composition comprises a sense strand, and the hydrophobic ligand or moiety is attached to the sense strand (e.g. attached to a 5′ end of the sense strand, or attached to a 3′ end of the sense strand). In some embodiments, the composition comprises an antisense strand, and the hydrophobic ligand or moiety is attached to the antisense strand (e.g. attached to a 5′ end of the antisense strand, or attached to a 3′ end of the antisense strand). In some embodiments, the composition comprises a hydrophobic ligand or moiety attached at a 3′ or 5′ terminus of the oligonucleotide.

[0121] In some embodiments, a hydrophobic moiety is attached to the oligonucleotide (e.g. a sense strand and/or an antisense strand of a siRNA). In some embodiments, a hydrophobic moiety is attached at a 3′ terminus of the oligonucleotide. In some embodiments, a hydrophobic moiety is attached at a 5′ terminus of the oligonucleotide. In some embodiments, the hydrophobic moiety comprises cholesterol. In some embodiments, the hydrophobic moiety includes a cyclohexanyl.

[0122] In some embodiments, the composition comprises an oligonucleotide that inhibits the expression of MST1, wherein the oligonucleotide comprises a lipid attached at a 3′ or 5′ terminus of the oligonucleotide. In some embodiments, a lipid is attached at a 3′ terminus of the oligonucleotide. In some embodiments, a lipid is attached at a 5′ terminus of the oligonucleotide. In some embodiments, the lipid comprises cholesterol, myristoyl, palmitoyl, stearoyl, lithocholoyl, docosanoyl, docosahexaenoyl, myristyl, palmityl, stearyl, or α-tocopherol, or a combination thereof. In some embodiments, the lipid comprises stearyl, lithocholyl, docosanyl, docosahexaenyl, or myristyl. In some embodiments, the lipid comprises cholesterol. In some embodiments, the lipid includes a sterol such as cholesterol. In some embodiments, the lipid comprises stearyl, t-butylphenol, n-butylphenol, octylphenol, dodecylphenol, phenyl n-dodecyl, octadecylbenzamide, hexadecylbenzamide, or octadecylcyclohexyl. In some embodiments, the lipid comprises phenyl para C12.

[0123] In some embodiments, the oligonucleotide comprises any aspect of the following structure:

[chemical structure]

In some embodiments, the oligonucleotide comprises any aspect of the following structure:

[chemical structure]

In some embodiments, the oligonucleotide comprises any aspect of the following structure:

[chemical structure]

In some embodiments, the oligonucleotide comprises any aspect of the following structure: The aspect included in the oligonucleotide may include the entire structure, or may include the lipid moiety, of any of the structures shown. In some embodiments, n is 1-3. In some embodiments, n is 1. In some embodiments, n is 2. In some embodiments, n is 3. In some embodiments, R is an alkyl group. In some embodiments, the alkyl group contains 1, 2, 3, 4, 5, 6, 7, 8, 9, 10, 11, 12, 13, 14, 15, 16, 17, 18, 19, or 20 carbons. In some embodiments, the alkyl group contains 4, 5, 6, 7, 8, 9, 10, 11, 12, 13, 14, 15, 16, 17, or 18 carbons, or a range defined by any two of the aforementioned numbers of carbons. In some embodiments, the alkyl group contains 4-18 carbons. In some embodiments, the lipid moiety comprises an alcohol or ether.

[0124] In some embodiments, the lipid includes a fatty acid. In some embodiments, the lipid comprises a lipid depicted in Table 1. The example lipid moieties in Table 1 are shown attached at a 5′ end of an oligonucleotide, in which the 5′ terminal phosphate of the oligonucleotide is shown with the lipid moiety. In some embodiments, a lipid moiety in Table 1 may be attached at a different point of attachment than shown. For example, the point of attachment of any of the lipid moieties in the table may be at a 3′ oligonucleotide end. In some embodiments, the lipid is used for targeting the oligonucleotide to a non-hepatic cell or tissue.

TABLE 1
Hydrophobic moiety examples

| Hydrophobic | Hydrophobic | |
|---|---|---|
| Moiety Description | Moiety Name | Example Conjugation |
| stearyl | ETL3 | [chemical structure] |
| t-butylphenyl | ETL7 | [chemical structure] |
| n-butylphenyl | ETL8 | [chemical structure] |
| octylphenyl | ETL9 | [chemical structure] |
| dodecylphenyl | ETL10 | [chemical structure] |
| phenyl n-dodecyl | ETL12 | [chemical structure] |
| octadecylbenzamide | ETL13 | [chemical structure] |
| hexadecylbenzamide | ETL15 | [chemical structure] |
| octadecylcyclohexyl | ETL16 | [chemical structure] |

[0125] In some embodiments, the lipid or lipid moiety includes 16 to 18 carbons. In some embodiments, the lipid includes 16 carbons. In some embodiments, the lipid includes 17 carbons. In some embodiments, the lipid includes 18 carbons. In some embodiments, the lipid moiety includes 16 carbons. In some embodiments, the lipid moiety includes 17 carbons. In some embodiments, the lipid moiety includes 18 carbons.

[0126] The hydrophobic moiety may include a linker that comprises a carbocycle. The carbocycle may be six-membered. Some examples of a carbocycle include phenyl or cyclohexyl. The linker may include a phenyl. The linker may include a cyclohexyl. The lipid may be attached to the carbocycle, which may in turn be attached at a phosphate (e.g. 5′ or 3′ phosphate) of the oligonucleotide. In some embodiments, the lipid or hydrocarbon, and the end of the sense are connected to the phenyl or cyclohexyl linker in the 1,4; 1,3; or 1,2 substitution pattern (e.g. the para, meta, or ortho phenyl configuration). In some embodiments, the lipid or hydrocarbon, and the end of the sense are connected to the phenyl or cyclohexyl linker in the 1,4 substitution pattern (e.g. the para phenyl configuration). The lipid may be attached to the carbocycle in the 1,4 substitution pattern relative to the oligonucleotide. The lipid may be attached to the carbocycle in the 1,3 substitution pattern relative to the oligonucleotide. The lipid may be attached to the carbocycle in the 1,2 substitution pattern relative to the oligonucleotide. The lipid may be attached to the carbocycle in the ortho orientation relative to the oligonucleotide. The lipid may be attached to the carbocycle in the para orientation relative to the oligonucleotide. The lipid may be attached to the carbocycle in the meta orientation relative to the oligonucleotide.

[0127] The lipid moiety may comprise or consist of the following structure

[chemical structure]

In some embodiments, the lipid moiety comprises or consists of the following structure:

[chemical structure]

In some embodiments, the lipid moiety comprises the following structure:

[chemical structure]

In some embodiments, the lipid moiety comprises or consist of the following structure:

[chemical structure]

In some embodiments, the dotted line indicates a covalent connection. The covalent connection may between an end of the sense or antisense strand. For example, the connection may be to the 5′ end of the sense strand. In some embodiments, n is 0-3. In some embodiments, n is 1-3. In some embodiments, n is 0. In some embodiments, n is 1. In some embodiments, n is 2. In some embodiments, n is 3. In some embodiments, n is 4. In some embodiments, n is 5. In some embodiments, n is 1, 2, 3, 4, 5, 6, 7, 8, 9, or 10. In some embodiments, R is an alkyl group. In some embodiments, the alkyl group contains 1, 2, 3, 4, 5, 6, 7, 8, 9, 10, 11, 12, 13, 14, 15, 16, 17, 18, 19, or 20 carbons. In some embodiments, the alkyl group contains 4, 5, 6, 7, 8, 9, 10, 11, 12, 13, 14, 15, 16, 17, or 18 carbons, or a range defined by any two of the aforementioned numbers of carbons. In some embodiments, R comprises or consists of an alkyl group containing 4-18 carbons.

[0128] The lipid moiety may be attached at a 5′ end of the oligonucleotide. The 5′ end may have one phosphate linking the lipid moiety to a 5′ carbon of a sugar of the oligonucleotide. The 5′ end may have two phosphates linking the lipid moiety to a 5′ carbon of a sugar of the oligonucleotide. The 5′ end may have three phosphates linking the lipid moiety to a 5′ carbon of a sugar of the oligonucleotide. The 5′ end may have one phosphate connected to the 5′ carbon of a sugar of the oligonucleotide, where the one phosphate is connected to the lipid moiety. The 5′ end may have two phosphates connected to the 5′ carbon of a sugar of the oligonucleotide, where the one of the two phosphates is connected to the lipid moiety. The 5′ end may have three phosphates connected to the 5′ carbon of a sugar of the oligonucleotide, where the one of the three phosphates is connected to the lipid moiety. The sugar may include a ribose. The sugar may include a deoxyribose. The sugar may be modified a such as a 2′ modified sugar (e.g. a 2′ O-methyl or 2′ fluoro ribose). A phosphate of the 5′ end may include a modification such as a sulfur in place of an oxygen. Two phosphates of the 5′ end may include a modification such as a sulfur in place of an oxygen. Three phosphates of the 5′ end may include a modification such as a sulfur in place of an oxygen.

[0129] In some embodiments, the oligonucleotide includes 1 lipid moiety. In some embodiments, the oligonucleotide includes 2 lipid moieties. In some embodiments, the oligonucleotide includes 3 lipid moieties. In some embodiments, the oligonucleotide includes 4 lipid moieties.

[0130] Some embodiments relate to a method of making an oligonucleotide comprising a hydrophobic conjugate. A strategy for making hydrophobic conjugates may include use of a phosphoramidite reagent based upon a 6-membered ring alcohol such as a phenol or cyclohexanol. The phosphoramidite may be reacted to a nucleotide to connect the nucleotide to the hydrophobic moiety, and thereby produce the hydrophobic conjugate. Some examples of phosphoramidite reagents that may be used to produce a hydrophobic conjugate are provided as follows:

[chemical structure]

In some embodiments, n is 1-3. In some embodiments, n is 1. In some embodiments, n is 2. In some embodiments, n is 3. In some embodiments, R is an alkyl group. In some embodiments, the alkyl group contains 1, 2, 3, 4, 5, 6, 7, 8, 9, 10, 11, 12, 13, 14, 15, 16, 17, 18, 19, or 20 carbons. In some embodiments, the alkyl group contains 4, 5, 6, 7, 8, 9, 10, 11, 12, 13, 14, 15, 16, 17, or 18 carbons, or a range defined by any two of the aforementioned numbers of carbons. In some embodiments, R comprises or consists of an alkyl group containing 4-18 carbons. Any one of the phosphoramidite reagents may be reacted to a 5′ end of an oligonucleotide to produce an oligonucleotide comprising a hydrophobic moiety. In some embodiments, the phosphoramidite reagents is reacted to a 5′ end of a sense strand of an siRNA. The sense strand may then be hybridized to an antisense strand to form a duplex. The hybridization may be performed by incubating the sense and antisense strands in solution at a given temperature. The temperature may be gradually reduced. The temperature may comprise or include a temperature comprising an annealing temperature for the sense and antisense strands. The temperature may be below or include a temperature below the annealing temperature for the sense and antisense strands. The temperature may be below a melting temperature of the sense and antisense strands.

[0131] The lipid may be attached to the oligonucleotide by a linker. The linker may include a polyethyleneglycol (e.g. tetraethyleneglycol).

[0132] The modifications described herein may be useful for delivery to a cell or tissue, for example, extrahepatic delivery or targeting of an oligonucleotide composition. The modifications described herein may be useful for targeting an oligonucleotide composition to a cell or tissue.

### 2. Sugar Moieties

[0133] In some embodiments, the composition comprises an oligonucleotide that inhibits the expression of MST1, wherein the oligonucleotide comprises a sugar moiety. The sugar moiety may include an N-acetyl galactose moiety (e.g. an N-acetylgalactosamine (GalNAc) moiety), an N-acetyl glucose moiety (e.g. an N-acetylglucosamine (GlcNAc) moiety), a fucose moiety, or a mannose moiety. The sugar moiety may include 1, 2, 3, or more sugar molecules. The sugar moiety may be attached at a 3′ or 5′ terminus of the oligonucleotide. The sugar moiety may include an N-acetyl galactose moiety. The sugar moiety may include an N-acetylgalactosamine (GalNAc) moiety. The sugar moiety may include an N-acetyl glucose moiety. The sugar moiety may include N-acetylglucosamine (GlcNAc) moiety. The sugar moiety may include a fucose moiety. The sugar moiety may include a mannose moiety. N-acetyl glucose, GlcNAc, fucose, or mannose may be useful for targeting macrophages when they target or bind a mannose receptor such as CD206. The sugar moiety may be useful for binding or targeting an asialoglycoprotein receptor such as an asialoglycoprotein receptor of a hepatocyte. The GalNAc moiety may bind to an asialoglycoprotein receptor. The GalNAc moiety may target a hepatocyte.

[0134] In some embodiments, the composition comprises an oligonucleotide that inhibits the expression of MST1, wherein the oligonucleotide comprises an N-acetylgalactosamine (GalNAc) moiety. GalNAc may be useful for hepatocyte targeting. The GalNAc moiety may include a bivalent or trivalent branched linker. The oligo may be attached to 1, 2 or 3 GalNAcs through a bivalent or trivalent branched linker. The GalNAc moiety may include 1, 2, 3, or more GalNAc molecules. The GalNAc moiety may be attached at a 3′ or 5′ terminus of the oligonucleotide.

[0135] In some embodiments, the composition comprises an oligonucleotide that inhibits the expression of MST1, wherein the oligonucleotide comprises an N-acetylgalactosamine (GalNAc) ligand for hepatocyte targeting. In some embodiments, the composition comprises GalNAc. In some embodiments, the composition comprises a GalNAc derivative. In some embodiments, the GalNAc ligand is attached at a 3′ terminus of the oligonucleotide. In some embodiments, the GalNAc ligand is attached at a 5′ terminus of the oligonucleotide. In some embodiments, the composition comprises a sense strand, and the GalNAc ligand is attached to the sense strand (e.g. attached to a 5′ end of the sense strand, or attached to a 3′ end of the sense strand). In some embodiments, the composition comprises an antisense strand, and the GalNAc ligand is attached to the antisense strand (e.g. attached to a 5′ end of the antisense strand, or attached to a 3′ end of the antisense strand). In some embodiments, the composition comprises a GalNAc ligand attached at a 3′ or 5′ terminus of the oligonucleotide.

[0136] Disclosed herein, in some embodiments, are compositions comprising an oligonucleotide that inhibits the expression of MST1, wherein the oligonucleotide comprises a GalNAc moiety. The GalNAc moiety may be included in any formula, structure, or GalNAc moiety shown below. In some embodiments, described herein is a compound (e.g. oligonucleotide) represented by Formula (I) or (II):

[chemical structure]

[0137] or a salt thereof, wherein
[0138] J is an oligonucleotide;
[0139] each w is independently selected from any value from 1 to 20;
[0140] each v is independently selected from any value from 1 to 20;
[0141] n is selected from any value from 1 to 20;
[0142] m is selected from any value from 1 to 20;
[0143] z is selected from any value from 1 to 3, wherein
   [0144] if z is 3, Y is C
   [0145] if z is 2, Y is CR⁶, or
   [0146] if z is 1, Y is C(R⁶)₂;
[0147] Q is selected from:
   [0148] C₃₋₁₀ carbocycle optionally substituted with one or more substituents independently selected from halogen, —CN, —NO₂, —OR⁷, —SR⁷, —N(R⁷)₂, —C(O)R⁷, —C(O)N(R⁷)₂, —N(R⁷)C(O)R⁷, —N(R⁷)C(O)N(R⁷)₂, —OC(O)N(R⁷)₂, —N(R)C(O)OR⁷, —C(O)OR⁷, —OC(O)R⁷, —S(O)R⁷, and C₁₋₆ alkyl, wherein the C₁₋₆ alkyl, is optionally substituted with one or more substituents independently selected from halogen, —CN, —OH, —SH, —NO₂, and —NH₂;
[0149] R¹ is a linker selected from:
   [0150] —O—, —S—, —N(R⁷)—, —C(O)—, —C(O)N(R)—, —N(R⁷)C(O)—, —N(R⁷)C(O)N(R⁷)—, —OC(O)N(R)—, —N(R⁷)C(O)O—, —C(O)O—, —OC(O)—, —S(O)—, —S(O)₂—, —OS(O)₂—, —OP(O)(OR⁷)O—, —SP(O)(OR⁷)O—, —OP(S)(OR⁷)O—, —OP(O)(SR⁷)O—, —OP(O)(OR⁷)S—, —OP(O)(O⁻)O—, —SP(O)(O⁻)O—, —OP(S)(O⁻)O—, —OP(O)(S⁻)O—, —OP(O)(O)S—, —OP(O)(OR)NR⁷—, —OP(O)(N(R⁷)₂)NR⁷—, —OP(OR⁷)O—, —OP(N(R⁷)₂)O—, —OP(OR)N(R⁷)—, and —OPN(R⁷)₂NR⁷—;
[0151] each R² is independently selected from:
   [0152] C₁₋₆ alkyl optionally substituted with one or more substituents independently selected from halogen, —OR⁷, —SR⁷, —N(R⁷)₂, —C(O)R⁷, —C(O)N(R⁷)₂, —N(R⁷)C(O)R⁷, —N(R⁷)C(O)N(R⁷)₂, —OC(O)N(R⁷)₂, —N(R⁷)C(O)OR⁷, —C(O)OR⁷, —OC(O)R⁷, and —S(O)R⁷;
[0153] R³ and R⁴ are each independently selected from:
   [0154] —OR⁷, —SR⁷, —N(R⁷)₂, —C(O)R⁷, —C(O)N(R⁷)₂, —N(R⁷)C(O)R⁷, —N(R⁷)C(O)N(R⁷)₂, —OC(O)N(R⁷)₂, —N(R⁷)C(O)OR⁷, —C(O)OR⁷, —OC(O)R⁷, and —S(O)R⁷;
[0155] each R⁵ is independently selected from:
   [0156] —OC(O)R⁷, —OC(O)N(R⁷)₂, —N(R⁷)C(O)R⁷, —N(R⁷)C(O)N(R⁷)₂, —N(R⁷)C(O)OR⁷, —C(O)R⁷, —C(O)OR⁷, and —C(O)N(R⁷)₂;
[0157] each R⁶ is independently selected from:
   [0158] hydrogen;
   [0159] halogen, —CN, —NO₂, —OR⁷, —SR⁷, —N(R⁷)₂, —C(O)R⁷, —C(O)N(R⁷)₂, —N(R⁷)C(O)R⁷, —N(R⁷)C(O)N(R⁷)₂, —OC(O)N(R⁷)₂, —N(R⁷)C(O)OR⁷, —C(O)OR⁷, —OC(O)R⁷, and —S(O)R⁷; and
   [0160] C₁₋₆ alkyl optionally substituted with one or more substituents independently selected from halogen, —CN, —NO₂, —OR⁷, —SR⁷, —N(R⁷)₂, —C(O)R⁷, —C(O)N(R⁷)₂, —N(R)C(O)R⁷, —N(R⁷)C(O)N(R⁷)₂, —OC(O)N(R⁷)₂, —N(R⁷)C(O)OR⁷, —C(O)OR⁷, —OC(O)R⁷, and —S(O)R⁷;
[0161] each R⁷ is independently selected from:
   [0162] hydrogen;
   [0163] C₁₋₆ alkyl, C₂₋₆ alkenyl, and C₂₋₆ alkynyl, each of which is optionally substituted with one or more substituents independently selected from halogen, —CN, —OH, —SH, —NO₂, —NH₂, ═O, ═S, —O—C₁₋₆ alkyl, —S—C₁₋₆ alkyl, —N(C₁₋₆ alkyl)₂, —NH(C₁₋₆ alkyl), C₃₋₁₀ carbocycle, and 3- to 10-membered heterocycle; and
   [0164] C₃₋₁₀ carbocycle, and 3- to 10-membered heterocycle, each of which is optionally substituted with one or more substituents independently selected from halogen, —CN, —OH, —SH, —NO₂, —NH₂, ═O, ═S, —O—C₁₋₆ alkyl, —S—C₁₋₆ alkyl, —N(C₁₋₆ alkyl)₂, —NH(C₁₋₆ alkyl), C₁₋₆ alkyl, C₂₋₆ alkenyl, C₂₋₆ alkynyl, C₃₋₁₀ carbocycle, 3- to 10-membered heterocycle, and C₁₋₆haloalkyl.
      In some embodiments, each w is independently selected from any value from 1 to 10. In some embodiments, each w is independently selected from any value from 1 to 5. In some embodiments, each w is 1. In some embodiments, each v is independently selected from any value from 1 to 10. In some embodiments, each v is independently selected from any value from 1 to 5. In some embodiments, each v is 1. In some embodiments, n is selected from any value from 1 to 10. In some embodiments, n is selected from any value from 1 to 5. In some embodiments, n is 2. In some embodiments, m is selected from any value from 1 to 10. In some embodiments, m is selected from any value from 1 to 5. In some embodiments, m is selected from 1 and 2. In some embodiments, z is 3 and Y is C. In some embodiments, Q is selected from C₅₋₆ carbocycle optionally substituted with one or more substituents independently selected from halogen, —CN, —NO₂, —OR⁷, —SR⁷, —N(R⁷)₂, —C(O)R⁷, —C(O)N(R⁷)₂, —N(R⁷)C(O)R⁷, —N(R⁷)C(O)N(R⁷)₂, —OC(O)N(R⁷)₂, —N(R)C(O)OR⁷, —C(O)OR⁷, —OC(O)R⁷, and —S(O)R⁷. In some embodiments, Q is selected from C₅₋₆ carbocycle optionally substituted with one or more substituents independently selected from halogen, —CN, —OH, —SH, —NO₂, and —NH₂. In some embodiments, Q is selected from phenyl and cyclohexyl, each of which is optionally substituted with one or more substituents independently selected from halogen, —CN, —OH, —SH, —NO₂, and —NH₂. In some embodiments, Q is selected from phenyl. In some embodiments, Q is selected from cyclohexyl. In some embodiments, R¹ is selected from —OP(O)(OR⁷)O—, —SP(O)(OR⁷)O—, —OP(S)(OR⁷)O—, —OP(O)(SR⁷)O—, —OP(O)(OR⁷)S—, —OP(O)(O⁻)O—, —SP(O)(O⁻)O—, —OP(S)(O⁻)O—, —OP(O)(S⁻)O—, —OP(O)(O⁻)S—, —OP(O)(OR⁷)NR⁷—, —OP(O)(N(R⁷)₂)NR⁷—, —OP(OR⁷)O—, —OP(N(R⁷)₂)O—, —OP(OR⁷)N(R⁷)—, and —OPN(R⁷)₂—NR⁷. In some embodiments, R¹ is selected from —OP(O)(OR⁷)O—, —SP(O)(OR⁷)O—, —OP(S)(OR⁷)O—, —OP(O)(SR⁷)O—, —OP(O)(OR⁷)S—, —OP(O)(O⁻)O—, —SP(O)(0)O—, —OP(S)(O⁻)O—, —OP(O)(S⁻)O—, —OP(O)(0-)S—, and —OP(OR⁷)O—. In some embodiments, R¹ is selected from —OP(O)(OR)O—, —OP(S)(OR)O—, —OP(O)(O⁻)O—, —OP(S)(O)O—, —OP(O)(S⁻)O—, and —OP(OR⁷)O—. In some embodiments, R¹ is selected from —OP(O)(OR⁷)O— and —OP(OR⁷)O—. In some embodiments, R² is selected from C₁₋₃ alkyl substituted with one or more substituents independently selected from halogen, —OR⁷, —OC(O)R⁷, —SR⁷, —N(R⁷)₂, —C(O)R⁷, and —S(O)R⁷. In some embodiments, R² is selected from C₁₋₃ alkyl substituted with one or more substituents independently selected from —OR⁷, —OC(O)R⁷, —SR⁷, and —N(R)₂. In some embodiments, R² is selected from C₁₋₃ alkyl substituted with one or more substituents independently selected from —OR⁷ and —OC(O)R⁷. In some embodiments, R³ is selected from halogen, —OR⁷, —SR⁷, —N(R⁷)₂, —C(O)R⁷, —OC(O)R⁷, and —S(O)R⁷. In some embodiments, R³ is selected from —OR⁷, —SR⁷, —OC(O)R⁷, and —N(R⁷)₂. In some embodiments, R³ is selected from —OR⁷— and —OC(O)R⁷. In some embodiments, R⁴ is selected from halogen, —OR⁷, —SR⁷, —N(R⁷)₂, —C(O)R⁷, —OC(O)R⁷, and —S(O)R⁷. In some embodiments, R⁴ is selected from —OR⁷, —SR⁷, —OC(O)R⁷, and —N(R)₂. In some embodiments, R⁴ is selected from —OR⁷— and —OC(O)R⁷. In some embodiments, R⁵ is selected from —OC(O)R⁷, —OC(O)N(R⁷)₂, —N(R⁷)C(O)R⁷, —N(R⁷)C(O)N(R⁷)₂, and —N(R⁷)C(O)OR⁷. In some embodiments, R⁵ is selected from —OC(O)R⁷ and —N(R⁷)C(O)R⁷. In some embodiments, each R⁷ is independently selected from: hydrogen; and C₁₋₆ alkyl optionally substituted with one or more substituents independently selected from halogen, —CN, —OH, —SH, —NO₂, —NH₂, ═O, ═S, —O—C₁₋₆ alkyl, —S—C₁₋₆ alkyl, —N(C₁₋₆ alkyl)₂, —NH(C₁₋₆ alkyl), C₃0.10 carbocycle, or 3- to 10-membered heterocycle. In some embodiments, each R⁷ is independently selected from C₁₋₆ alkyl optionally substituted with one or more substituents independently selected from halogen, —CN, —OH, —SH, —NO₂, —NH₂, ═O, ═S, —O—C₁₋₆ alkyl, —S—C₁₋₆ alkyl, —N(C₁₋₆ alkyl)₂, and —NH(C₁₋₆ alkyl). In some embodiments, each R⁷ is independently selected from C₁₋₆ alkyl optionally substituted with one or more substituents independently selected from halogen, —CN, —OH, and —SH. In some embodiments, w is 1; v is 1; n is 2; m is 1 or 2; z is 3 and Y is C; Q is phenyl or cyclohexyl, each of which is optionally substituted with one or more substituents independently selected from halogen, —CN, —OH, —SH, —NO₂, —NH₂, and C₁₋₃ alkyl; R¹ is selected from —OP(O)(OR⁷)O—, —OP(S)(OR⁷)O—, —OP(O)(O⁻)O—, —OP(S)(O⁻)O—, —OP(O)(S⁻)O—, and —OP(OR⁷)O—; R² is C₁ alkyl substituted with —OH or —OC(O)CH₃;
[0165] R³ is —OH or —OC(O)CH₃; R⁴ is —OH or —OC(O)CH₃; and R⁵ is —NH(O)CH₃. In some embodiments, the compound comprises:

[chemical structure]

[chemical structure]

[chemical structure]

[chemical structure]

[chemical structure]

[chemical structure]

[chemical structure]

[chemical structure]

[chemical structure]

[chemical structure]

[chemical structure]

[chemical structure]

[chemical structure]

[chemical structure]

[chemical structure]

[chemical structure]

[chemical structure]

In some embodiments, the oligonucleotide (J) is attached at a 5′ end or a 3′ end of the oligonucleotide. In some embodiments, the oligonucleotide comprises DNA. In some embodiments, the oligonucleotide comprises RNA. In some embodiments, the oligonucleotide comprises one or more modified internucleoside linkages. In some embodiments, the one or more modified internucleoside linkages comprise alkylphosphonate, phosphorothioate, methylphosphonate, phosphorodithioate, alkylphosphonothioate, phosphoramidate, carbamate, carbonate, phosphate triester, acetamidate, or carboxymethyl ester, or a combination thereof. In some embodiments, the oligonucleotide comprises 1, 2, 3, 4, 5, 6, 7, 8, 9, 10, 11, 12, 13, 14, 15, 16, 17, 18, 19, or 20 modified internucleoside linkages. In some embodiments, the compound binds to an asialoglycoprotein receptor. In some embodiments, the compound targets a hepatocyte.

[0166] Some embodiments include the following, where J is the oligonucleotide:

[chemical structure]

J may include one or more additional phosphates, or one or more phosphorothioates linking to the oligonucleotide. J may include one or more additional phosphates linking to the oligonucleotide. J may include one or more phosphorothioates linking to the oligonucleotide.

[0167] Some embodiments include the following, where J is the oligonucleotide:

[chemical structure]

J may include one or more additional phosphates, or one or more phosphorothioates linking to the oligonucleotide. J may include one or more additional phosphates linking to the oligonucleotide. J may include one or more phosphorothioates linking to the oligonucleotide.

[0168] Some embodiments include the following, where J is the oligonucleotide.

[chemical structure]

J may include one or more phosphates or phosphorothioates linking to the oligonucleotide. J may include one or more phosphates linking to the oligonucleotide. J may include a phosphate linking to the oligonucleotide. J may include one or more phosphorothioates linking to the oligonucleotide. J may include a phosphorothioate linking to the oligonucleotide.

[0169] Some embodiments include the following, where J is the oligonucleotide:

[chemical structure]

The structure in this compound attached to the oligonucleotide (J) may be referred to as “ETL17,” and is an example of a GalNAc moiety. J may include one or more phosphates or phosphorothioates linking to the oligonucleotide. J may include one or more phosphates linking to the oligonucleotide. J may include a phosphate linking to the oligonucleotide. J may include one or more phosphorothioates linking to the oligonucleotide. J may include a phosphorothioate linking to the oligonucleotide.

[0170] Some embodiments include the following, where the phosphate or “5′” indicates a connection to the oligonucleotide:

[chemical structure]

[0171] Some embodiments include the following, where the phosphate or “5′” indicates a connection to the oligonucleotide:

[chemical structure]

[0172] Some embodiments include the following, where J is the oligonucleotide:

[chemical structure]

include one or more phosphates or phosphorothioates linking to the oligonucleotide. J may include one or more phosphates linking to the oligonucleotide. J may include a phosphate linking to the oligonucleotide. J may include one or more phosphorothioates linking to the oligonucleotide. J may include a phosphorothioate linking to the oligonucleotide.

[0173] Some embodiments include the following, where J is the oligonucleotide:

[chemical structure]

The structure in this compound attached to the oligonucleotide (J) may be referred to as “ETL1,” and is an example of a GalNAc moiety. J may include one or more phosphates or phosphorothioates linking to the oligonucleotide. J may include one or more phosphates linking to the oligonucleotide. J may include a phosphate linking to the oligonucleotide. J may include one or more phosphorothioates linking to the oligonucleotide. J may include a phosphorothioate linking to the oligonucleotide. 3. siRNA modification patterns

[0174] In some embodiments, the composition comprises an oligonucleotide that inhibits the expression of MST1, wherein the oligonucleotide comprises an siRNA comprising a sense strand and an antisense strand, wherein the sense strand comprises modification pattern 1 S: 5′-NfsnsNfnNfnNfNfNfnNfnNfnNfnNfnNfsnsn-3′ (SEQ ID NO: 6164), wherein “Nf” is a 2′ fluoro-modified nucleoside, “n” is a 2′ O-methyl modified nucleoside, and “s” is a phosphorothioate linkage. In some embodiments, the sense strand comprises modification pattern 2S: 5′-nsnsnnNfnNfNfNfnnnnnnnnnnsnsn-3′ (SEQ ID NO: 6165), wherein “Nf” is a 2′ fluoro-modified nucleoside, “n” is a 2′ O-methyl modified nucleoside, and “s” is a phosphorothioate linkage. In some embodiments, the sense strand comprises modification pattern 3S: 5′-nsnsnnNfniNfnNfnnnnnnnnnnsnsn-3′ (SEQ ID NO: 6166), wherein “Nf” is a 2′ fluoro-modified nucleoside, “n” is a 2′ O-methyl modified nucleoside, and “s” is a phosphorothioate linkage. In some embodiments, the sense strand comprises modification pattern 4S: 5′-NfsnsNfnNfnNfNfNfnNfnNfnNfnNfnNfsnsnN-moiety-3′ (SEQ ID NO: 6167), wherein “Nf” is a 2′ fluoro-modified nucleoside, “n” is a 2′ O-methyl modified nucleoside, “s” is a phosphorothioate linkage, and N comprises one or more nucleosides. In some embodiments, the sense strand comprises modification pattern 5S: 5′-nsnsnnNfnNfNfNfinnnnnnnnnnsnsnN-moiety-3′ (SEQ ID NO: 6168), wherein “Nf” is a 2′ fluoro-modified nucleoside, “n” is a 2′ O-methyl modified nucleoside, “s” is a phosphorothioate linkage, and N comprises one or more nucleosides. In some embodiments, the moiety in modification pattern 4S or 5S includes an integrin targeting ligand. In some embodiments, the moiety in modification pattern 4S or 5S is a sugar moiety. In some embodiments, the sense strand comprises modification pattern 6S: 5′-NfsnsNfnNfnNfnNfnNfnNfnNfnNfnNfsnsn-3′ (SEQ ID NO: 6169), wherein “Nf” is a 2′ fluoro-modified nucleoside, “n” is a 2′ O-methyl modified nucleoside, and “s” is a phosphorothioate linkage. In some embodiments, the sense strand comprises modification pattern 7S: 5′-nsnsnnNfNfNfNfNfnnnnnnnnnnsnsn-3′ (SEQ ID NO: 6170), wherein “Nf” is a 2′ fluoro-modified nucleoside, “n” is a 2′ O-methyl modified nucleoside, and “s” is a phosphorothioate linkage. In some embodiments, the sense strand comprises modification pattern 8S: 5′-nsnsnnnNfNfNfNfnnnnnnnnnnsnsn-3′ (SEQ ID NO: 6171), wherein “Nf” is a 2′ fluoro-modified nucleoside, “n” is a 2′ O-methyl modified nucleoside, and “s” is a phosphorothioate linkage. In some embodiments, the sense strand comprises modification pattern 9S: 5′-nsnsnnnnNfNfNfNfinnnnnnnnnsnsn-3′ (SEQ ID NO: 6172), wherein “Nf” is a 2′ fluoro-modified nucleoside, “n” is a 2′ O-methyl modified nucleoside, and “s” is a phosphorothioate linkage. In some embodiments, the sense strand comprises modification pattern 10S: 5′-snnnnNfnnnNfNfnnnnnnnnnsnsn-3′ (SEQ ID NO: 6320), wherein “Nf” is a 2′ fluoro-modified nucleoside, “n” is a 2′ O-methyl modified nucleoside, and “s” is a phosphorothioate linkage. In some embodiments, the sense strand comprises modification pattern 11S: 5′-sNfnNfnNfnNfndNnNfnnnNfnNfnnsnsn-3′ (SEQ ID NO: 6321), wherein “Nf” is a 2′ fluoro-modified nucleoside, “n” is a 2′ O-methyl modified nucleoside, and “s” is a phosphorothioate linkage. In some embodiments, the sense strand comprises modification pattern 12S: 5′-sNfnNfnNfnNfndNnnnNfnNfnnnnsnsn-3′ (SEQ ID NO: 6322), wherein “Nf” is a 2′ fluoro-modified nucleoside, “n” is a 2′ O-methyl modified nucleoside, and “s” is a phosphorothioate linkage. In some embodiments, the sense strand comprises modification pattern 13S: 5′-snnnnNfNfnNfNfnNfnnnnnnnnsnsn-3′ (SEQ ID NO: 6323), wherein “Nf” is a 2′ fluoro-modified nucleoside, “n” is a 2′ O-methyl modified nucleoside, and “s” is a phosphorothioate linkage. In some embodiments, the sense strand comprises modification pattern 14S: 5′-snnnnnNfNfNfNfnnnnnnnnnnsnsn-3′ (SEQ ID NO: 6324), wherein “Nf” is a 2′ fluoro-modified nucleoside, “n” is a 2′ O-methyl modified nucleoside, and “s” is a phosphorothioate linkage. In some embodiments, the sense strand comprises modification pattern 15S: 5′-snnnnNfnNfnNfnnnnnnnnnnsnsn-3′ (SEQ ID NO: 6325), wherein “Nf” is a 2′ fluoro-modified nucleoside, “n” is a 2′ O-methyl modified nucleoside, and “s” is a phosphorothioate linkage. In some embodiments, the sense strand comprises modification pattern 16S: 5′-nsnsnnNfNfnNfNfnnnnnnnnnnsnsn-3′ (SEQ ID NO: 6326), wherein “Nf” is a 2′ fluoro-modified nucleoside, “n” is a 2′ O-methyl modified nucleoside, and “s” is a phosphorothioate linkage. In some embodiments, the sense strand comprises modification pattern 17S: 5′-NfsnsNfnNfnNfndNnNfmnnNfnNfnnsnsn-3′ (SEQ ID NO: 6327), wherein “Nf” is a 2′ fluoro-modified nucleoside, “n” is a 2′ O-methyl modified nucleoside, and “s” is a phosphorothioate linkage. In some embodiments, the sense strand comprises modification pattern 18S: 5′-nsnsnnnnNfNfNfNfNfnnnnnnnnsnsn-3′ (SEQ ID NO: 6328), wherein “Nf” is a 2′ fluoro-modified nucleoside, “n” is a 2′ O-methyl modified nucleoside, and “s” is a phosphorothioate linkage. In some embodiments, the sense strand comprises modification pattern 19S: 5′-nsnsnnnNfNfNfNfNfnnnnnnnnnsnsn-3′ (SEQ ID NO: 6329), wherein “Nf” is a 2′ fluoro-modified nucleoside, “n” is a 2′ O-methyl modified nucleoside, and “s” is a phosphorothioate linkage. In some embodiments, the sense strand comprises modification pattern 20S: 5′-snnnnnNfnNfNfnnnnnnnnnnsnsn-3′ (SEQ ID NO: 6330), wherein “Nf” is a 2′ fluoro-modified nucleoside, “n” is a 2′ O-methyl modified nucleoside, and “s” is a phosphorothioate linkage. In some embodiments, the sense strand comprises modification pattern 21S: 5′-snnnnnnNfNfNfNfNfnnnnnnnnsnsn-3′ (SEQ ID NO: 6331), wherein “Nf” is a 2′ fluoro-modified nucleoside, “n” is a 2′ O-methyl modified nucleoside, and “s” is a phosphorothioate linkage. In some embodiments, the sense strand comprises modification pattern 22S: 5′-snnnnNfNfnnNfnnnnnnnnnnsnsn-3′ (SEQ ID NO: 6332), wherein “Nf” is a 2′ fluoro-modified nucleoside, “n” is a 2′ O-methyl modified nucleoside, and “s” is a phosphorothioate linkage. In some embodiments, the sense strand comprises modification pattern 23S: 5′-snnnnNfNfnNfNfnnnnnnnnnnsnsn-3′ (SEQ ID NO: 6333), wherein “Nf” is a 2′ fluoro-modified nucleoside, “n” is a 2′ O-methyl modified nucleoside, and “s” is a phosphorothioate linkage. In some embodiments, the sense strand comprises modification pattern 24S: 5′-snnnnnNfNfnNfNfnnnnnnnnnsnsn-3′ (SEQ ID NO: 6334), wherein “Nf” is a 2′ fluoro-modified nucleoside, “n” is a 2′ O-methyl modified nucleoside, and “s” is a phosphorothioate linkage. In some embodiments, the sense strand comprises modification pattern 25S: 5′-snnnnnnNfnNfnNfnnnnnnnnsnsn-3′ (SEQ ID NO: 6335), wherein “Nf” is a 2′ fluoro-modified nucleoside, “n” is a 2′ O-methyl modified nucleoside, and “s” is a phosphorothioate linkage. In some embodiments, the sense strand comprises modification pattern 26S: 5′-snnnnnNfnnNfnNfnnnnnnnnsnsn-3′ (SEQ ID NO: 6336), wherein “Nf” is a 2′ fluoro-modified nucleoside, “n” is a 2′ O-methyl modified nucleoside, and “s” is a phosphorothioate linkage. In some embodiments, the sense strand comprises modification pattern 27S: 5′-snnnnNfnNfNfNfNfnnnnnnnnsnsn-3′ (SEQ ID NO: 6337), wherein “Nf” is a 2′ fluoro-modified nucleoside, “n” is a 2′ O-methyl modified nucleoside, and “s” is a phosphorothioate linkage. In some embodiments, the sense strand comprises modification pattern 28S: 5′-snnnnnNfNfNfNfNfiinnnnnnnnsnsn-3′ (SEQ ID NO: 6338), wherein “Nf” is a 2′ fluoro-modified nucleoside, “n” is a 2′ O-methyl modified nucleoside, and “s” is a phosphorothioate linkage. In some embodiments, the sense strand comprises modification pattern 29S: 5′-snnnnnNfnnNfNfnnnnnnnnnsnsn-3′ (SEQ ID NO: 6339), wherein “Nf” is a 2′ fluoro-modified nucleoside, “n” is a 2′ O-methyl modified nucleoside, and “s” is a phosphorothioate linkage. In some embodiments, the sense strand comprises modification pattern 30S: 5′-snnnnnnNfnNfNfnnnnnnnnnsnsn-3′ (SEQ ID NO: 6340), wherein “Nf” is a 2′ fluoro-modified nucleoside, “n” is a 2′ O-methyl modified nucleoside, and “s” is a phosphorothioate linkage. In some embodiments, the sense strand comprises modification pattern 31s: 5′-snnnnNfNfnnNfNfnnnnnnnnnsnsn-3′ (SEQ ID NO: 6341), wherein “Nf” is a 2′ fluoro-modified nucleoside, “n” is a 2′ O-methyl modified nucleoside, and “s” is a phosphorothioate linkage. In some embodiments, the sense strand comprises modification pattern 32S: 5′-snnnnNfnnNfNfnnnnnnnnnnsnsn-3′ (SEQ ID NO: 6342), wherein “Nf” is a 2′ fluoro-modified nucleoside, “n” is a 2′ O-methyl modified nucleoside, and “s” is a phosphorothioate linkage. In some embodiments, the sense strand comprises modification pattern 33S: 5′-snnnnNfndNnNfnNfnnnnnnnnsnsn-3′ (SEQ ID NO: 6343), wherein “Nf” is a 2′ fluoro-modified nucleoside, “n” is a 2′ O-methyl modified nucleoside, and “s” is a phosphorothioate linkage. In some embodiments, the sense strand comprises modification pattern 34S: 5′-snnnnnnnnNfdNNfnnnnnnnnsnsn-3′ (SEQ ID NO: 6344), wherein “Nf” is a 2′ fluoro-modified nucleoside, “n” is a 2′ O-methyl modified nucleoside, and “s” is a phosphorothioate linkage. In some embodiments, the sense strand comprises modification pattern 35S: 5′-snnnnNfnnnNfnNfnnnnnnnnsnsn-3′ (SEQ ID NO: 6319), wherein “Nf” is a 2′ fluoro-modified nucleoside, “n” is a 2′ O-methyl modified nucleoside, and “s” is a phosphorothioate linkage.

[0175] In some embodiments, the composition comprises an oligonucleotide that inhibits the expression of MST1, wherein the oligonucleotide comprises an siRNA comprising a sense strand and an antisense strand, wherein the antisense strand comprises modification pattern 1AS: 5′-nsNfsnNfnNfnNfnNfnnnNfnNfnNfnsnsn-3′ (SEQ ID NO: 6173), wherein “Nf” is a 2′ fluoro-modified nucleoside, “n” is a 2′ O-methyl modified nucleoside, and “s” is a phosphorothioate linkage. In some embodiments, the antisense strand comprises modification pattern 2AS: 5′-nsNfsnnnNfnNfNfnnnnNfnNfnnnsnsn-3′ (SEQ ID NO: 6174), wherein “Nf” is a 2′ fluoro-modified nucleoside, “n” is a 2′ O-methyl modified nucleoside, and “s” is a phosphorothioate linkage. In some embodiments, the antisense strand comprises modification pattern 3AS: 5′-nsNfsnnnNfnnnnnnnNfnNfnnnsnsn-3′ (SEQ ID NO: 6175), wherein “Nf” is a 2′ fluoro-modified nucleoside, “n” is a 2′ O-methyl modified nucleoside, and “s” is a phosphorothioate linkage. In some embodiments, the antisense strand comprises modification pattern 4AS: 5′-nsNfsnNfnNfnnnnnnnNfnNfnnnsnsn-3′ (SEQ ID NO: 6176), wherein “Nf” is a 2′ fluoro-modified nucleoside, “n” is a 2′ O-methyl modified nucleoside, and “s” is a phosphorothioate linkage. In some embodiments, the antisense strand comprises modification pattern 5AS: 5′-nsNfsnnnnnnnnnnnNfnNfnnnsnsn-3′ (SEQ ID NO: 6177), wherein “Nf” is a 2′ fluoro-modified nucleoside, “n” is a 2′ O-methyl modified nucleoside, and “s” is a phosphorothioate linkage. In some embodiments, the antisense strand comprises modification pattern 6AS: 5′-nsNfsnnnNfnnNfnnnnNfnNfnnnsnsn-3′ (SEQ ID NO: 6178), wherein “Nf” is a 2′ fluoro-modified nucleoside, “n” is a 2′ O-methyl modified nucleoside, and “s” is a phosphorothioate linkage. In some embodiments, the antisense strand comprises modification pattern 7AS: 5′-nsNfsnNfnNfnNfnNfnNfnNfnNfnNfnsnsn-3′ (SEQ ID NO: 6179), wherein “Nf” is a 2′ fluoro-modified nucleoside, “n” is a 2′ O-methyl modified nucleoside, and “s” is a phosphorothioate linkage. In some embodiments, the antisense strand comprises modification pattern 8AS: 5′-nsNfsnnnnnnnnnnnNfnnnnnsnsn-3′ (SEQ ID NO: 6180), wherein “Nf” is a 2′ fluoro-modified nucleoside, “n” is a 2′ O-methyl modified nucleoside, and “s” is a phosphorothioate linkage. In some embodiments, the antisense strand comprises modification pattern 9AS: 5′-nsNfsnNfnnnNfnnnNfnNfnNfnNfnsnsn-3′ (SEQ ID NO: 6345), wherein “Nf” is a 2′ fluoro-modified nucleoside, “n” is a 2′ O-methyl modified nucleoside, and “s” is a phosphorothioate linkage. In some embodiments, the antisense strand comprises modification pattern 10AS: 5′-nsNfsnNfnNfnnnNfnNfnNfnNfnNfnsnsn-3′ (SEQ ID NO: 6346), wherein “Nf” is a 2′ fluoro-modified nucleoside, “n” is a 2′ O-methyl modified nucleoside, and “s” is a phosphorothioate linkage. In some embodiments, the antisense strand comprises modification pattern 11 AS: 5′-nsNfsnNfnNfnnnnnNfnNfnNfnNfnsnsn-3′ (SEQ ID NO: 6347), wherein “Nf” is a 2′ fluoro-modified nucleoside, “n” is a 2′ O-methyl modified nucleoside, and “s” is a phosphorothioate linkage. In some embodiments, the antisense strand comprises modification pattern 12AS: 5′-nsNfsnNfnnNfNfnNfnNfnNfnNfnNfnsnsn-3′ (SEQ ID NO: 6348), wherein “Nf” is a 2′ fluoro-modified nucleoside, “n” is a 2′ O-methyl modified nucleoside, and “s” is a phosphorothioate linkage. In some embodiments, the antisense strand comprises modification pattern 13AS: 5′-nsNfsnNfnnnNfnNfnNfnNfnNfnNfnsnsn-3′ (SEQ ID NO: 6349), wherein “Nf” is a 2′ fluoro-modified nucleoside, “n” is a 2′ O-methyl modified nucleoside, and “s” is a phosphorothioate linkage. In some embodiments, the antisense strand comprises modification pattern 14AS: 5′-nsNfsnnNfnNfnnNfnNfnNfnNfnNfnsnsn-3′ (SEQ ID NO: 6350), wherein “Nf” is a 2′ fluoro-modified nucleoside, “n” is a 2′ O-methyl modified nucleoside, and “s” is a phosphorothioate linkage. In some embodiments, the antisense strand comprises modification pattern 15AS: 5′-nsNfsnnnnNfnnNfnNfnNfnNfnNfnsnsn-3′ (SEQ ID NO: 6351), wherein “Nf” is a 2′ fluoro-modified nucleoside, “n” is a 2′ O-methyl modified nucleoside, and “s” is a phosphorothioate linkage. In some embodiments, the antisense strand comprises modification pattern 16AS: 5′-nsNfsnnnNfnnnNfnNfnNfnNfnNfnsnsn-3′ (SEQ ID NO: 6352), wherein “Nf” is a 2′ fluoro-modified nucleoside, “n” is a 2′ O-methyl modified nucleoside, and “s” is a phosphorothioate linkage. In some embodiments, the antisense strand comprises modification pattern 17AS: 5′-nsNfsnNfnnNfnnNfnNfnNfnNfnNfnsnsn-3′ (SEQ ID NO: 6353), wherein “Nf” is a 2′ fluoro-modified nucleoside, “n” is a 2′ O-methyl modified nucleoside, and “s” is a phosphorothioate linkage. In some embodiments, the antisense strand comprises modification pattern 18AS: 5′-nsNfsnnnNfnNfnNfnNfnNfnNfnNfnsnsn-3′ (SEQ ID NO: 6354), wherein “Nf” is a 2′ fluoro-modified nucleoside, “n” is a 2′ O-methyl modified nucleoside, and “s” is a phosphorothioate linkage. In some embodiments, the antisense strand comprises modification pattern 19AS: 5′-nsNfsnNfnNfnNfnnnNfnNfnNfnNfnsnsn-3′ (SEQ ID NO: 6355), wherein “Nf” is a 2′ fluoro-modified nucleoside, “n” is a 2′ O-methyl modified nucleoside, and “s” is a phosphorothioate linkage. In some embodiments, the antisense strand comprises modification pattern 20AS: 5′-nsNfsnnnNfnNfnnnNfnNfnNfnNfnsnsn-3′ (SEQ ID NO: 6356), wherein “Nf” is a 2′ fluoro-modified nucleoside, “n” is a 2′ O-methyl modified nucleoside, and “s” is a phosphorothioate linkage. In some embodiments, the antisense strand comprises modification pattern 21AS: 5′-nsNfsnnNfnnnnNfnNfnNfnNfnNfnsnsn-3′ (SEQ ID NO: 6357), wherein “Nf” is a 2′ fluoro-modified nucleoside, “n” is a 2′ O-methyl modified nucleoside, and “s” is a phosphorothioate linkage.

[0176] In some embodiments, the composition comprises an oligonucleotide that inhibits the expression of MST1, wherein the oligonucleotide comprises an siRNA comprising a sense strand and an antisense strand, wherein the sense strand comprises pattern 1S and the antisense strand comprises pattern 1AS, 2AS, 3AS, 4AS, 5AS, 6AS, 7AS, 8AS, 9AS, 10AS, 11AS, 12AS, 13AS, 14AS, 15AS, 16AS, 17AS, 18AS, 19AS, 20AS, or 21AS. In some embodiments, the sense strand comprises pattern 2S and the antisense strand comprises pattern 1AS, 2AS, 3AS, 4AS, 5AS, 6AS, 7AS, 8AS, 9AS, 10AS, 11 AS, 12AS, 13AS, 14AS, 15AS, 16AS, 17AS, 18AS, 19AS, 20AS, or 21AS. In some embodiments, the sense strand comprises pattern 3S and the antisense strand comprises pattern 1AS, 2AS, 3AS, 4AS, 5AS, 6AS, 7AS, 8AS, 9AS, 10AS, 11AS, 12AS, 13AS, 14AS, 15AS, 16AS, 17AS, 18AS, 19AS, 20AS, or 21AS. In some embodiments, the sense strand comprises pattern 4S and the antisense strand comprises pattern 1AS, 2AS, 3AS, 4AS, 5AS, 6AS, 7AS, 8AS, 9AS, 10AS, 11AS, 12AS, 13AS, 14AS, 15AS, 16AS, 17AS, 18AS, 19AS, 20AS, or 21AS. In some embodiments, the sense strand comprises pattern 5S and the antisense strand comprises pattern 1AS, 2AS, 3AS, 4AS, 5AS, 6AS, 7AS, 8AS, 9AS, 10AS, 11 AS, 12AS, 13AS, 14AS, 15AS, 16AS, 17AS, 18AS, 19AS, 20AS, or 21AS. In some embodiments, the sense strand comprises pattern 6S and the antisense strand comprises pattern 1AS, 2AS, 3AS, 4AS, 5AS, 6AS, 7AS, 8AS, 9AS, 10AS, 11AS, 12AS, 13AS, 14AS, 15AS, 16AS, 17AS, 18AS, 19AS, 20AS, or 21AS. In some embodiments, the sense strand comprises pattern 7S and the antisense strand comprises pattern 1AS, 2AS, 3AS, 4AS, 5AS, 6AS, 7AS, 8AS, 9AS, 10AS, 11AS, 12AS, 13AS, 14AS, 15AS, 16AS, 17AS, 18AS, 19AS, 20AS, or 21AS. In some embodiments, the sense strand comprises pattern 8S and the antisense strand comprises pattern 1AS, 2AS, 3AS, 4AS, 5AS, 6AS, 7AS, 8AS, 9AS, 10AS, 11 AS, 12AS, 13AS, 14AS, 15AS, 16AS, 17AS, 18AS, 19AS, 20AS, or 21AS. In some embodiments, the sense strand comprises pattern 9S and the antisense strand comprises pattern 1AS, 2AS, 3AS, 4AS, 5AS, 6AS, 7AS, 8AS, 9AS, 10AS, 11AS, 12AS, 13AS, 14AS, 15AS, 16AS, 17AS, 18AS, 19AS, 20AS, or 21AS. In some embodiments, the sense strand comprises pattern 10S and the antisense strand comprises pattern 1AS, 2AS, 3AS, 4AS, 5AS, 6AS, 7AS, 8AS, 9AS, 10AS, 11 AS, 12AS, 13AS, 14AS, 15AS, 16AS, 17AS, 18AS, 19AS, 20AS, or 21AS. In some embodiments, the sense strand comprises pattern 11S and the antisense strand comprises pattern 1AS, 2AS, 3AS, 4AS, 5AS, 6AS, 7AS, 8AS, 9AS, 10AS, 11 AS, 12AS, 13AS, 14AS, 15AS, 16AS, 17AS, 18AS, 19AS, 20AS, or 21AS. In some embodiments, the sense strand comprises pattern 12S and the antisense strand comprises pattern 1AS, 2AS, 3AS, 4AS, 5AS, 6AS, 7AS, 8AS, 9AS, 10AS, 11AS, 12AS, 13AS, 14AS, 15AS, 16AS, 17AS, 18AS, 19AS, 20AS, or 21AS. In some embodiments, the sense strand comprises pattern 13S and the antisense strand comprises pattern 1AS, 2AS, 3AS, 4AS, 5AS, 6AS, 7AS, 8AS, 9AS, 10AS, 11 AS, 12AS, 13AS, 14AS, 15AS, 16AS, 17AS, 18AS, 19AS, 20AS, or 21AS. In some embodiments, the sense strand comprises pattern 14S and the antisense strand comprises pattern 1AS, 2AS, 3AS, 4AS, 5AS, 6AS, 7AS, 8AS, 9AS, 10AS, 11 AS, 12AS, 13AS, 14AS, 15AS, 16AS, 17AS, 18AS, 19AS, 20AS, or 21AS. In some embodiments, the sense strand comprises pattern 15S and the antisense strand comprises pattern 1AS, 2AS, 3AS, 4AS, 5AS, 6AS, 7AS, 8AS, 9AS, 10AS, 11AS, 12AS, 13AS, 14AS, 15AS, 16AS, 17AS, 18AS, 19AS, 20AS, or 21AS. In some embodiments, the sense strand comprises pattern 16S and the antisense strand comprises pattern 1AS, 2AS, 3AS, 4AS, 5AS, 6AS, 7AS, 8AS, 9AS, 10AS, 11 AS, 12AS, 13AS, 14AS, 15AS, 16AS, 17AS, 18AS, 19AS, 20AS, or 21AS. In some embodiments, the sense strand comprises pattern 17S and the antisense strand comprises pattern 1AS, 2AS, 3AS, 4AS, 5AS, 6AS, 7AS, 8AS, 9AS, 10AS, 11 AS, 12AS, 13AS, 14AS, 15AS, 16AS, 17AS, 18AS, 19AS, 20AS, or 21AS. In some embodiments, the sense strand comprises pattern 18S and the antisense strand comprises pattern 1AS, 2AS, 3AS, 4AS, 5AS, 6AS, 7AS, 8AS, 9AS, 10AS, 11AS, 12AS, 13AS, 14AS, 15AS, 16AS, 17AS, 18AS, 19AS, 20AS, or 21AS. In some embodiments, the sense strand comprises pattern 19S and the antisense strand comprises pattern 1AS, 2AS, 3AS, 4AS, 5AS, 6AS, 7AS, 8AS, 9AS, 10AS, 11 AS, 12AS, 13AS, 14AS, 15AS, 16AS, 17AS, 18AS, 19AS, 20AS, or 21AS. In some embodiments, the sense strand comprises pattern 20S and the antisense strand comprises pattern 1AS, 2AS, 3AS, 4AS, 5AS, 6AS, 7AS, 8AS, 9AS, 10AS, 11 AS, 12AS, 13AS, 14AS, 15AS, 16AS, 17AS, 18AS, 19AS, 20AS, or 21AS. In some embodiments, the sense strand comprises pattern 21S and the antisense strand comprises pattern 1AS, 2AS, 3AS, 4AS, 5AS, 6AS, 7AS, 8AS, 9AS, 10AS, 11AS, 12AS, 13AS, 14AS, 15AS, 16AS, 17AS, 18AS, 19AS, 20AS, or 21AS. In some embodiments, the sense strand comprises pattern 22S and the antisense strand comprises pattern 1AS, 2AS, 3AS, 4AS, 5AS, 6AS, 7AS, 8AS, 9AS, 10AS, 11AS, 12AS, 13AS, 14AS, 15AS, 16AS, 17AS, 18AS, 19AS, 20AS, or 21AS. In some embodiments, the sense strand comprises pattern 23S and the antisense strand comprises pattern 1AS, 2AS, 3AS, 4AS, 5AS, 6AS, 7AS, 8AS, 9AS, 10AS, 11 AS, 12AS, 13AS, 14AS, 15AS, 16AS, 17AS, 18AS, 19AS, 20AS, or 21AS. In some embodiments, the sense strand comprises pattern 24S and the antisense strand comprises pattern 1AS, 2AS, 3AS, 4AS, 5AS, 6AS, 7AS, 8AS, 9AS, 10AS, 11AS, 12AS, 13AS, 14AS, 15AS, 16AS, 17AS, 18AS, 19AS, 20AS, or 21AS. In some embodiments, the sense strand comprises pattern 25S and the antisense strand comprises pattern 1AS, 2AS, 3AS, 4AS, 5AS, 6AS, 7AS, 8AS, 9AS, 10AS, 11 AS, 12AS, 13AS, 14AS, 15AS, 16AS, 17AS, 18AS, 19AS, 20AS, or 21AS. In some embodiments, the sense strand comprises pattern 26S and the antisense strand comprises pattern 1AS, 2AS, 3AS, 4AS, 5AS, 6AS, 7AS, 8AS, 9AS, 10AS, 11 AS, 12AS, 13AS, 14AS, 15AS, 16AS, 17AS, 18AS, 19AS, 20AS, or 21AS. In some embodiments, the sense strand comprises pattern 27S and the antisense strand comprises pattern 1AS, 2AS, 3AS, 4AS, 5AS, 6AS, 7AS, 8AS, 9AS, 10AS, 11AS, 12AS, 13AS, 14AS, 15AS, 16AS, 17AS, 18AS, 19AS, 20AS, or 21AS. In some embodiments, the sense strand comprises pattern 28S and the antisense strand comprises pattern 1AS, 2AS, 3AS, 4AS, 5AS, 6AS, 7AS, 8AS, 9AS, 10AS, 11 AS, 12AS, 13AS, 14AS, 15AS, 16AS, 17AS, 18AS, 19AS, 20AS, or 21AS. In some embodiments, the sense strand comprises pattern 29S and the antisense strand comprises pattern 1AS, 2AS, 3AS, 4AS, 5AS, 6AS, 7AS, 8AS, 9AS, 10AS, 11 AS, 12AS, 13AS, 14AS, 15AS, 16AS, 17AS, 18AS, 19AS, 20AS, or 21AS. In some embodiments, the sense strand comprises pattern 30S and the antisense strand comprises pattern 1AS, 2AS, 3AS, 4AS, 5AS, 6AS, 7AS, 8AS, 9AS, 10AS, 11AS, 12AS, 13AS, 14AS, 15AS, 16AS, 17AS, 18AS, 19AS, 20AS, or 21AS. In some embodiments, the sense strand comprises pattern 31S and the antisense strand comprises pattern 1AS, 2AS, 3AS, 4AS, 5AS, 6AS, 7AS, 8AS, 9AS, 10AS, 11 AS, 12AS, 13AS, 14AS, 15AS, 16AS, 17AS, 18AS, 19AS, 20AS, or 21AS. In some embodiments, the sense strand comprises pattern 32S and the antisense strand comprises pattern 1AS, 2AS, 3AS, 4AS, 5AS, 6AS, 7AS, 8AS, 9AS, 10AS, 11 AS, 12AS, 13AS, 14AS, 15AS, 16AS, 17AS, 18AS, 19AS, 20AS, or 21AS. In some embodiments, the sense strand comprises pattern 33S and the antisense strand comprises pattern 1AS, 2AS, 3AS, 4AS, 5AS, 6AS, 7AS, 8AS, 9AS, 10AS, 11AS, 12AS, 13AS, 14AS, 15AS, 16AS, 17AS, 18AS, 19AS, 20AS, or 21AS. In some embodiments, the sense strand comprises pattern 34S and the antisense strand comprises pattern 1AS, 2AS, 3AS, 4AS, 5AS, 6AS, 7AS, 8AS, 9AS, 10AS, 11 AS, 12AS, 13AS, 14AS, 15AS, 16AS, 17AS, 18AS, 19AS, 20AS, or 21AS. In some embodiments, the sense strand comprises pattern 35S and the antisense strand comprises pattern 1AS, 2AS, 3AS, 4AS, 5AS, 6AS, 7AS, 8AS, 9AS, 10AS, 11 AS, 12AS, 13AS, 14AS, 15AS, 16AS, 17AS, 18AS, 19AS, 20AS, or 21AS.

[0177] In some embodiments, the sense strand comprises pattern 1S, 2S, 3S, 4S, 5S, 6S, 7S, 8S, 9S, 10S, 11S, 12S, 13S, 14S, 15S, 16S, 17S, 18S, 19S, 20S, 21S, 22S, 23S, 24S, 25S, 26S, 27S, 28S, 29S, 30S, 31S, 32S, 33S, 34S, or 35S and the antisense strand comprises pattern 1AS. In some embodiments, the sense strand comprises pattern 1S, 2S, 3S, 4S, 5S, 6S, 7S, 8S, 9S, 10S, 11S, 12S, 13S, 14S, 15S, 16S, 17S, 18S, 19S, 20S, 21S, 22S, 23S, 24S, 25S, 26S, 27S, 28S, 29S, 30S, 31S, 32S, 33S, 34S, or 35S and the antisense strand comprises pattern 2AS. In some embodiments, the sense strand comprises pattern 1S, 2S, 3S, 4S, 5S, 6S, 7S, 8S, 9S, 10S, 11S, 12S, 13S, 14S, 15S, 16S, 17S, 18S, 19S, 20S, 21S, 22S, 23S, 24S, 25S, 26S, 27S, 28S, 29S, 30S, 31S, 32S, 33S, 34S, or 35S and the antisense strand comprises pattern 3AS. In some embodiments, the sense strand comprises pattern 1S, 2S, 3S, 4S, 5S, 6S, 7S, 8S, 9S, 10S, 11S, 12S, 13S, 14S, 15S, 16S, 17S, 18S, 19S, 20S, 21S, 22S, 23S, 24S, 25S, 26S, 27S, 28S, 29S, 30S, 31S, 32S, 33S, 34S, or 35S and the antisense strand comprises pattern 4AS. In some embodiments, the sense strand comprises pattern 1S, 2S, 3S, 4S, 5S, 6S, 7S, 8S, 9S, 10S, 11S, 12S, 13S, 14S, 15S, 16S, 17S, 18S, 19S, 20S, 21S, 22S, 23S, 24S, 25S, 26S, 27S, 28S, 29S, 30S, 31S, 32S, 33S, 34S, or 35S and the antisense strand comprises pattern 5AS. In some embodiments, the sense strand comprises pattern 1S, 2S, 3S, 4S, 5S, 6S, 7S, 8S, 9S, 10S, S, 12S, 13S, 14S, 15S, 16S, 17S, 18S, 19S, 20S, 21S, 22S, 23S, 24S, 25S, 26S, 27S, 28S, 29S, 30S, 31S, 32S, 33S, 34S, or 35S and the antisense strand comprises pattern 6AS. In some embodiments, the sense strand comprises pattern 1S, 2S, 3S, 4S, 5S, 6S, 7S, 8S, 9S, 10S, 11S, 12S, 13S, 14S, 15S, 16S, 17S, 18S, 19S, 20S, 21S, 22S, 23S, 24S, 25S, 26S, 27S, 28S, 29S, 30S, 31S, 32S, 33S, 34S, or 35S and the antisense strand comprises pattern 7AS. In some embodiments, the sense strand comprises pattern 1S, 2S, 3S, 4S, 5S, 6S, 7S, 8S, 9S, 10S, 11S, 12S, 13S, 14S, 15S, 16S, 17S, 18S, 19S, 20S, 21S, 22S, 23S, 24S, 25S, 26S, 27S, 28S, 29S, 30S, 31S, 32S, 33S, 34S, or 35S and the antisense strand comprises pattern 8AS. In some embodiments, the sense strand comprises pattern 1S, 2S, 3S, 4S, 5S, 6S, 7S, 8S, 9S, 10S, 11S, 12S, 13S, 14S, 15S, 16S, 17S, 18S, 19S, 20S, 21S, 22S, 23S, 24S, 25S, 26S, 27S, 28S, 29S, 30S, 31S, 32S, 33S, 34S, or 35S and the antisense strand comprises pattern 9AS. In some embodiments, the sense strand comprises pattern 1S, 2S, 3S, 4S, 5S, 6S, 7S, 8S, 9S, 10S, 11S, 12S, 13S, 14S, 15S, 16S, 17S, 18S, 19S, 20S, 21S, 22S, 23S, 24S, 25S, 26S, 27S, 28S, 29S, 30S, 31S, 32S, 33S, 34S, or 35S and the antisense strand comprises pattern 10AS. In some embodiments, the sense strand comprises pattern 1S, 2S, 3S, 4S, 5S, 6S, 7S, 8S, 9S, 10S, 11S, 12S, 13S, 14S, 15S, 16S, 17S, 18S, 19S, 20S, 21S, 22S, 23S, 24S, 25S, 26S, 27S, 28S, 29S, 30S, 31S, 32S, 33S, 34S, or 35S and the antisense strand comprises pattern 11 AS. In some embodiments, the sense strand comprises pattern 1S, 2S, 3S, 4S, 5S, 6S, 7S, 8S, 9S, 10S, 11S, 12S, 13S, 14S, 15S, 16S, 17S, 18S, 19S, 20S, 21S, 22S, 23S, 24S, 25S, 26S, 27S, 28S, 29S, 30S, 31S, 32S, 33S, 34S, or 35S and the antisense strand comprises pattern 12AS. In some embodiments, the sense strand comprises pattern 1S, 2S, 3S, 4S, 5S, 6S, 7S, 8S, 9S, 10S, 11S, 12S, 13S, 14S, 15S, 16S, 17S, 18S, 19S, 20S, 21S, 22S, 23S, 24S, 25S, 26S, 27S, 28S, 29S, 30S, 31S, 32S, 33S, 34S, or 35S and the antisense strand comprises pattern 13AS. In some embodiments, the sense strand comprises pattern 1S, 2S, 3S, 4S, 5S, 6S, 7S, 8S, 9S, 10S, 11S, 12S, 13S, 14S, 15S, 16S, 17S, 18S, 19S, 20S, 21S, 22S, 23S, 24S, 25S, 26S, 27S, 28S, 29S, 30S, 31S, 32S, 33S, 34S, or 35S and the antisense strand comprises pattern 14AS. In some embodiments, the sense strand comprises pattern 1S, 2S, 3S, 4S, 5S, 6S, 7S, 8S, 9S, 10S, 11S, 12S, 13S, 14S, 15S, 16S, 17S, 18S, 19S, 20S, 21S, 22S, 23S, 24S, 25S, 26S, 27S, 28S, 29S, 30S, 31S, 32S, 33S, 34S, or 35S and the antisense strand comprises pattern 15AS. In some embodiments, the sense strand comprises pattern 1S, 2S, 3S, 4S, 5S, 6S, 7S, 8S, 9S, 10S, 11S, 12S, 13S, 14S, 15S, 16S, 17S, 18S, 19S, 20S, 21S, 22S, 23S, 24S, 25S, 26S, 27S, 28S, 29S, 30S, 31S, 32S, 33S, 34S, or 35S and the antisense strand comprises pattern 16AS. In some embodiments, the sense strand comprises pattern 1S, 2S, 3S, 4S, 5S, 6S, 7S, 8S, 9S, 10S, 11S, 12S, 13S, 14S, 15S, 16S, 17S, 18S, 19S, 20S, 21S, 22S, 23S, 24S, 25S, 26S, 27S, 28S, 29S, 30S, 31S, 32S, 33S, 34S, or 35S and the antisense strand comprises pattern 17AS. In some embodiments, the sense strand comprises pattern 1S, 2S, 3S, 4S, 5S, 6S, 7S, 8S, 9S, 10S, 11S, 12S, 13S, 14S, 15S, 16S, 17S, 18S, 19S, 20S, 21S, 22S, 23S, 24S, 25S, 26S, 27S, 28S, 29S, 30S, 31S, 32S, 33S, 34S, or 35S and the antisense strand comprises pattern 18AS. In some embodiments, the sense strand comprises pattern 1S, 2S, 3S, 4S, 5S, 6S, 7S, 8S, 9S, 10S, 11S, 12S, 13S, 14S, 15S, 16S, 17S, 18S, 19S, 20S, 21S, 22S, 23S, 24S, 25S, 26S, 27S, 28S, 29S, 30S, 31S, 32S, 33S, 34S, or 35S and the antisense strand comprises pattern 19AS. In some embodiments, the sense strand comprises pattern 1S, 2S, 3S, 4S, 5S, 6S, 7S, 8S, 9S, 10S, 11S, 12S, 13S, 14S, 15S, 16S, 17S, 18S, 19S, 20S, 21S, 22S, 23S, 24S, 25S, 26S, 27S, 28S, 29S, 30S, 31S, 32S, 33S, 34S, or 35S and the antisense strand comprises pattern 20AS. In some embodiments, the sense strand comprises pattern 1S, 2S, 3S, 4S, 5S, 6S, 7S, 8S, 9S, 10S, 11S, 12S, 13S, 14S, 15S, 16S, 17S, 18S, 19S, 20S, 21S, 22S, 23S, 24S, 25S, 26S, 27S, 28S, 29S, 30S, 31S, 32S, 33S, 34S, or 35S and the antisense strand comprises pattern 21AS.

[0178] In some embodiments, the sense strand comprises modification pattern 1AS, 2AS, 3AS, 4AS, 5AS, 6AS, 7AS, 8AS, 9AS, 10AS, 11AS, 12AS, 13AS, 14AS, 15AS, 16AS, 17AS, 18AS, 19AS, 20AS, or 21AS. In some embodiments, the antisense strand comprises modification pattern 1S, 2S, 3S, 4S, 5S, 6S, 7S, 8S, 9S, 10S, 11S, 12S, 13S, 14S, 15S, 16S, 17S, 18S, 19S, 20S, 21S, 22S, 23S, 24S, 25S, 26S, 27S, 28S, 29S, 30S, 31S, 32S, 33S, 34S, or 35S. In some embodiments, the sense strand or the antisense strand comprises modification pattern ASO1.

[0179] In some embodiments, purines of the sense strand comprise 2′ fluoro modified purines. In some embodiments, purines of the sense strand comprise 2′ methyl modified purines. In some embodiments, purines of the sense strand comprise a mixture of 2′ fluoro and 2′ methyl modified purines. In some embodiments, all purines of the sense strand comprise 2′ fluoro modified purines. In some embodiments, all purines of the sense strand comprise 2′ methyl modified purines. In some embodiments, all purines of the sense strand comprise a mixture of 2′ fluoro and 2′ methyl modified purines.

[0180] In some embodiments, pyrimidines of the sense strand comprise 2′ fluoro modified pyrimidines. In some embodiments, pyrimidines of the sense strand comprise 2′ methyl modified pyrimidines. In some embodiments, pyrimidines of the sense strand comprise a mixture of 2′ fluoro and 2′ methyl modified pyrimidines. In some embodiments, all pyrimidines of the sense strand comprise 2′ fluoro modified pyrimidines. In some embodiments, all pyrimidines of the sense strand comprise 2′ methyl modified pyrimidines. In some embodiments, all pyrimidines of the sense strand comprise a mixture of 2′ fluoro and 2′ methyl modified pyrimidines.

[0181] In some embodiments, purines of the sense strand comprise 2′ fluoro modified purines, and pyrimidines of the sense strand comprise a mixture of 2′ fluoro and 2′ methyl modified pyrimidines. In some embodiments, purines of the sense strand comprise 2′ methyl modified purines, and pyrimidines of the sense strand comprise a mixture of 2′ fluoro and 2′ methyl modified pyrimidines. In some embodiments, purines of the sense strand comprise 2′ fluoro modified purines, and pyrimidines of the sense strand comprise 2′ methyl modified pyrimidines. In some embodiments, purines of the sense strand comprise 2′ methyl modified purines, and pyrimidines of the sense strand comprise 2′ fluoro modified pyrimidines. In some embodiments, pyrimidines of the sense strand comprise 2′ fluoro modified pyrimidines, and purines of the sense strand comprise a mixture of 2′ fluoro and 2′ methyl modified purines. In some embodiments, pyrimidines of the sense strand comprise 2′ methyl modified pyrimidines, and purines of the sense strand comprise a mixture of 2′ fluoro and 2′ methyl modified purines. In some embodiments, pyrimidines of the sense strand comprise 2′ fluoro modified pyrimidines, and purines of the sense strand comprise 2′ methyl modified purines. In some embodiments, pyrimidines of the sense strand comprise 2′ methyl modified pyrimidines, and purines of the sense strand comprise 2′ fluoro modified purines.

[0182] In some embodiments, all purines of the sense strand comprise 2′ fluoro modified purines, and all pyrimidines of the sense strand comprise a mixture of 2′ fluoro and 2′ methyl modified pyrimidines. In some embodiments, all purines of the sense strand comprise 2′ methyl modified purines, and all pyrimidines of the sense strand comprise a mixture of 2′ fluoro and 2′ methyl modified pyrimidines. In some embodiments, all purines of the sense strand comprise 2′ fluoro modified purines, and all pyrimidines of the sense strand comprise 2′ methyl modified pyrimidines. In some embodiments, all purines of the sense strand comprise 2′ methyl modified purines, and all pyrimidines of the sense strand comprise 2′ fluoro modified pyrimidines. In some embodiments, all pyrimidines of the sense strand comprise 2′ fluoro modified pyrimidines, and all purines of the sense strand comprise a mixture of 2′ fluoro and 2′ methyl modified purines. In some embodiments, all pyrimidines of the sense strand comprise 2′ methyl modified pyrimidines, and all purines of the sense strand comprise a mixture of 2′ fluoro and 2′ methyl modified purines. In some embodiments, all pyrimidines of the sense strand comprise 2′ fluoro modified pyrimidines, and all purines of the sense strand comprise 2′ methyl modified purines. In some embodiments, all pyrimidines of the sense strand comprise 2′ methyl modified pyrimidines, and all purines of the sense strand comprise 2′ fluoro modified purines.

[0183] In some embodiments, purines of the antisense strand comprise 2′ fluoro modified purines. In some embodiments, purines of the antisense strand comprise 2′ methyl modified purines. In some embodiments, purines of the antisense strand comprise a mixture of 2′ fluoro and 2′ methyl modified purines. In some embodiments, all purines of the antisense strand comprise 2′ fluoro modified purines. In some embodiments, all purines of the antisense strand comprise 2′ methyl modified purines. In some embodiments, all purines of the antisense strand comprise a mixture of 2′ fluoro and 2′ methyl modified purines.

[0184] In some embodiments, pyrimidines of the antisense strand comprise 2′ fluoro modified pyrimidines. In some embodiments, pyrimidines of the antisense strand comprise 2′ methyl modified pyrimidines. In some embodiments, pyrimidines of the antisense strand comprise a mixture of 2′ fluoro and 2′ methyl modified pyrimidines. In some embodiments, all pyrimidines of the antisense strand comprise 2′ fluoro modified pyrimidines. In some embodiments, all pyrimidines of the antisense strand comprise 2′ methyl modified pyrimidines. In some embodiments, all pyrimidines of the antisense strand comprise a mixture of 2′ fluoro and 2′ methyl modified pyrimidines.

[0185] In some embodiments, purines of the antisense strand comprise 2′ fluoro modified purines, and pyrimidines of the antisense strand comprise a mixture of 2′ fluoro and 2′ methyl modified pyrimidines. In some embodiments, purines of the antisense strand comprise 2′ methyl modified purines, and pyrimidines of the antisense strand comprise a mixture of 2′ fluoro and 2′ methyl modified pyrimidines. In some embodiments, purines of the antisense strand comprise 2′ fluoro modified purines, and pyrimidines of the antisense strand comprise 2′ methyl modified pyrimidines. In some embodiments, purines of the antisense strand comprise 2′ methyl modified purines, and pyrimidines of the antisense strand comprise 2′ fluoro modified pyrimidines. In some embodiments, pyrimidines of the antisense strand comprise 2′ fluoro modified pyrimidines, and purines of the antisense strand comprise a mixture of 2′ fluoro and 2′ methyl modified purines. In some embodiments, pyrimidines of the antisense strand comprise 2′ methyl modified pyrimidines, and purines of the antisense strand comprise a mixture of 2′ fluoro and 2′ methyl modified purines. In some embodiments, pyrimidines of the antisense strand comprise 2′ fluoro modified pyrimidines, and purines of the antisense strand comprise 2′ methyl modified purines. In some embodiments, pyrimidines of the antisense strand comprise 2′ methyl modified pyrimidines, and purines of the antisense strand comprise 2′ fluoro modified purines.

[0186] In some embodiments, all purines of the antisense strand comprise 2′ fluoro modified purines, and all pyrimidines of the antisense strand comprise a mixture of 2′ fluoro and 2′ methyl modified pyrimidines. In some embodiments, all purines of the antisense strand comprise 2′ methyl modified purines, and all pyrimidines of the antisense strand comprise a mixture of 2′ fluoro and 2′ methyl modified pyrimidines. In some embodiments, all purines of the antisense strand comprise 2′ fluoro modified purines, and all pyrimidines of the antisense strand comprise 2′ methyl modified pyrimidines. In some embodiments, all purines of the antisense strand comprise 2′ methyl modified purines, and all pyrimidines of the antisense strand comprise 2′ fluoro modified pyrimidines. In some embodiments, all pyrimidines of the antisense strand comprise 2′ fluoro modified pyrimidines, and all purines of the antisense strand comprise a mixture of 2′ fluoro and 2′ methyl modified purines. In some embodiments, all pyrimidines of the antisense strand comprise 2′ methyl modified pyrimidines, and all purines of the antisense strand comprise a mixture of 2′ fluoro and 2′ methyl modified purines. In some embodiments, all pyrimidines of the antisense strand comprise 2′ fluoro modified pyrimidines, and all purines of the antisense strand comprise 2′ methyl modified purines. In some embodiments, all pyrimidines of the antisense strand comprise 2′ methyl modified pyrimidines, and all purines of the antisense strand comprise 2′ fluoro modified purines.

[0187] Disclosed herein, in some embodiments are compositions comprising an oligonucleotide that targets MST1 and when administered to a cell decreases expression of MST1, wherein the oligonucleotide comprises a small interfering RNA (siRNA) comprising a sense strand and an antisense strand, wherein the sense strand comprises a sense strand sequence described herein in which at least one internucleoside linkage is modified and at least one nucleoside is modified, or an sense strand sequence comprising 1 or 2 nucleoside substitutions, additions, or deletions of the oligonucleotide sequence in which at least one internucleoside linkage is modified and at least one nucleoside is modified, and wherein the antisense strand comprises an antisense strand sequence described herein in which at least one internucleoside linkage is modified and at least one nucleoside is modified, or an oligonucleotide sequence comprising 1 or 2 nucleoside substitutions, additions, or deletions of the antisense strand sequence in which at least one internucleoside linkage is modified and at least one nucleoside is modified. Some embodiments relate to methods that include administering the composition to a subject.

[0188] In some embodiments, the siRNA comprises the sense strand and/or the antisense strand sequence of an siRNA in Table 9, or a nucleic acid sequence thereof having 3 or 4 nucleoside substitutions, additions, or deletions. In some embodiments, the siRNA comprises the sense strand and/or the antisense strand sequence of an siRNA in Table 9, or a nucleic acid sequence thereof having 1 or 2 nucleoside substitutions, additions, or deletions. In some embodiments, the siRNA comprises the sense strand and/or the antisense strand sequence of an siRNA in Table 9. The siRNA may include the same internucleoside linkage modifications or nucleoside modifications as those in Table 9. The siRNA may include any different internucleoside linkage modifications or nucleoside modifications different from those in Table 9. The siRNA may include some unmodified internucleoside linkages or nucleosides.

[0189] In some embodiments, the siRNA comprises the sense strand and/or the antisense strand sequence of an siRNA in Table 10, or a nucleic acid sequence thereof having 3 or 4 nucleoside substitutions, additions, or deletions. In some embodiments, the siRNA comprises the sense strand and/or the antisense strand sequence of an siRNA in Table 10, or a nucleic acid sequence thereof having 1 or 2 nucleoside substitutions, additions, or deletions. In some embodiments, the siRNA comprises the sense strand and/or the antisense strand sequence of an siRNA in Table 10. The siRNA may include the same internucleoside linkage modifications or nucleoside modifications as those in Table 10. The siRNA may include any different internucleoside linkage modifications or nucleoside modifications different from those in Table 10. The siRNA may include some unmodified internucleoside linkages or nucleosides.

[0190] In some embodiments, the siRNA comprises the sense strand and/or the antisense strand sequence of an siRNA in Table 24A, or a nucleic acid sequence thereof having 3 or 4 nucleoside substitutions, additions, or deletions. In some embodiments, the siRNA comprises the sense strand and/or the antisense strand sequence of an siRNA in Table 24A, or a nucleic acid sequence thereof having 1 or 2 nucleoside substitutions, additions, or deletions. In some embodiments, the siRNA comprises the sense strand and/or the antisense strand sequence of an siRNA in Table 24A. The siRNA may include the same internucleoside linkage modifications or nucleoside modifications as those in Table 24A. The siRNA may include any different internucleoside linkage modifications or nucleoside modifications different from those in Table 24A. The siRNA may include some unmodified internucleoside linkages or nucleosides.

[0191] In some embodiments, the siRNA comprises the sense strand and/or the antisense strand sequence of an siRNA in Table 24C, or a nucleic acid sequence thereof having 3 or 4 nucleoside substitutions, additions, or deletions. In some embodiments, the siRNA comprises the sense strand and/or the antisense strand sequence of an siRNA in Table 24C, or a nucleic acid sequence thereof having 1 or 2 nucleoside substitutions, additions, or deletions. In some embodiments, the siRNA comprises the sense strand and/or the antisense strand sequence of an siRNA in Table 24C. The siRNA may include the same internucleoside linkage modifications or nucleoside modifications as those in Table 24C. The siRNA may include any different internucleoside linkage modifications or nucleoside modifications different from those in Table 24C. The siRNA may include some unmodified internucleoside linkages or nucleosides.

[0192] In some embodiments, the siRNA comprises the sense strand and/or the antisense strand sequence of an siRNA in Table 30, or a nucleic acid sequence thereof having 3 or 4 nucleoside substitutions, additions, or deletions. In some embodiments, the siRNA comprises the sense strand and/or the antisense strand sequence of an siRNA in Table 30, or a nucleic acid sequence thereof having 1 or 2 nucleoside substitutions, additions, or deletions. In some embodiments, the siRNA comprises the sense strand and/or the antisense strand sequence of an siRNA in Table 30. The siRNA may include the same internucleoside linkage modifications or nucleoside modifications as those in Table 30. The siRNA may include any different internucleoside linkage modifications or nucleoside modifications different from those in Table 30. The siRNA may include some unmodified internucleoside linkages or nucleosides.

[0193] The siRNA may comprises the sense strand and/or the antisense strand sequence of an siRNA in any table included herein that includes modifications; or may include a nucleic acid sequence thereof having 1 or 2 nucleoside substitutions, additions, or deletions; or may include a nucleic acid sequence thereof having 3 or 4 nucleoside substitutions, additions, or deletions.

[0194] In some embodiments, the siRNA comprises a sense strand having a sequence in accordance with SEQ ID NO: 6208. In some embodiments, the sense strand sequence comprises or consists of sequence at least 75% identical to SEQ ID NO: 6208, at least 80% identical to SEQ ID NO: 6208, at least 85% identical to SEQ ID NO: 6208, at least 90% identical to SEQ ID NO: 6208, or at least 95% identical to SEQ ID NO: 6208. In some embodiments, the sense strand sequence comprises or consists of the sequence of SEQ ID NO 6208, or a sense strand sequence thereof having 1, 2, 3, or 4 nucleoside substitutions, additions, or deletions. In some embodiments, the sense strand sequence comprises or consists of the sequence of SEQ ID NO: 6208, or a sense strand sequence thereof having 1 or 2 nucleoside substitutions, additions, or deletions. In some embodiments, the sense strand sequence comprises or consists of a sequence 100% identical to SEQ ID NO: 6208. The sense strand may comprise a moiety such as a GalNAc moiety or a lipid moiety. In some embodiments, the siRNA comprises an antisense strand having a sequence in accordance with SEQ ID NO: 6267. In some embodiments, the antisense strand sequence comprises or consists of sequence at least 75% identical to SEQ ID NO: 6267, at least 80% identical to SEQ ID NO: 6267, at least 85% identical to SEQ ID NO: 6267, at least 90% identical to SEQ ID NO: 6267, or at least 95% identical to SEQ ID NO: 6267. In some embodiments, the antisense strand sequence comprises or consists of the sequence of SEQ ID NO 6267, or an antisense strand sequence thereof having 1, 2, 3, or 4 nucleoside substitutions, additions, or deletions. In some embodiments, the antisense strand sequence comprises or consists of the sequence of SEQ ID NO: 6267, or an antisense strand sequence thereof having 1 or 2 nucleoside substitutions, additions, or deletions. In some embodiments, the antisense strand sequence comprises or consists of a sequence 100% identical to SEQ ID NO: 6267. The antisense strand may comprise a moiety such as a GalNAc moiety or a lipid moiety.

[0195] In some embodiments, the siRNA comprises a sense strand having a sequence in accordance with SEQ ID NO: 6214. In some embodiments, the sense strand sequence comprises or consists of sequence at least 75% identical to SEQ ID NO: 6214, at least 80% identical to SEQ ID NO: 6214, at least 85% identical to SEQ ID NO: 6214, at least 90% identical to SEQ ID NO: 6214, or at least 95% identical to SEQ ID NO: 6214. In some embodiments, the sense strand sequence comprises or consists of the sequence of SEQ ID NO 6214, or a sense strand sequence thereof having 1, 2, 3, or 4 nucleoside substitutions, additions, or deletions. In some embodiments, the sense strand sequence comprises or consists of the sequence of SEQ ID NO: 6214, or a sense strand sequence thereof having 1 or 2 nucleoside substitutions, additions, or deletions. In some embodiments, the sense strand sequence comprises or consists of a sequence 100% identical to SEQ ID NO: 6214. The sense strand may comprise a moiety such as a GalNAc moiety or a lipid moiety. In some embodiments, the siRNA comprises an antisense strand having a sequence in accordance with SEQ ID NO: 6273. In some embodiments, the antisense strand sequence comprises or consists of sequence at least 75% identical to SEQ ID NO: 6273, at least 80% identical to SEQ ID NO: 6273, at least 85% identical to SEQ ID NO: 6273, at least 90% identical to SEQ ID NO: 6273, or at least 95% identical to SEQ ID NO: 6273. In some embodiments, the antisense strand sequence comprises or consists of the sequence of SEQ ID NO 6273, or an antisense strand sequence thereof having 1, 2, 3, or 4 nucleoside substitutions, additions, or deletions. In some embodiments, the antisense strand sequence comprises or consists of the sequence of SEQ ID NO: 6273, or an antisense strand sequence thereof having 1 or 2 nucleoside substitutions, additions, or deletions. In some embodiments, the antisense strand sequence comprises or consists of a sequence 100% identical to SEQ ID NO: 6273. The antisense strand may comprise a moiety such as a GalNAc moiety or a lipid moiety.

[0196] In some embodiments, the siRNA comprises a sense strand having a sequence in accordance with SEQ ID NO: 6215. In some embodiments, the sense strand sequence comprises or consists of sequence at least 75% identical to SEQ ID NO: 6215, at least 80% identical to SEQ ID NO: 6215, at least 85% identical to SEQ ID NO: 6215, at least 90% identical to SEQ ID NO: 6215, or at least 95% identical to SEQ ID NO: 6215. In some embodiments, the sense strand sequence comprises or consists of the sequence of SEQ ID NO 6215, or a sense strand sequence thereof having 1, 2, 3, or 4 nucleoside substitutions, additions, or deletions. In some embodiments, the sense strand sequence comprises or consists of the sequence of SEQ ID NO: 6215, or a sense strand sequence thereof having 1 or 2 nucleoside substitutions, additions, or deletions. In some embodiments, the sense strand sequence comprises or consists of a sequence 100% identical to SEQ ID NO: 6215. The sense strand may comprise a moiety such as a GalNAc moiety or a lipid moiety. In some embodiments, the siRNA comprises an antisense strand having a sequence in accordance with SEQ ID NO: 6274. In some embodiments, the antisense strand sequence comprises or consists of sequence at least 75% identical to SEQ ID NO: 6274, at least 80% identical to SEQ ID NO: 6274, at least 85% identical to SEQ ID NO: 6274, at least 90% identical to SEQ ID NO: 6274, or at least 95% identical to SEQ ID NO: 6274. In some embodiments, the antisense strand sequence comprises or consists of the sequence of SEQ ID NO 6274, or an antisense strand sequence thereof having 1, 2, 3, or 4 nucleoside substitutions, additions, or deletions. In some embodiments, the antisense strand sequence comprises or consists of the sequence of SEQ ID NO: 6274, or an antisense strand sequence thereof having 1 or 2 nucleoside substitutions, additions, or deletions. In some embodiments, the antisense strand sequence comprises or consists of a sequence 100% identical to SEQ ID NO: 6274. The antisense strand may comprise a moiety such as a GalNAc moiety or a lipid moiety.

[0197] In some embodiments, the siRNA comprises a sense strand having a sequence in accordance with SEQ ID NO: 6216. In some embodiments, the sense strand sequence comprises or consists of sequence at least 75% identical to SEQ ID NO: 6216, at least 80% identical to SEQ ID NO: 6216, at least 85% identical to SEQ ID NO: 6216, at least 90% identical to SEQ ID NO: 6216, or at least 95% identical to SEQ ID NO: 6216. In some embodiments, the sense strand sequence comprises or consists of the sequence of SEQ ID NO 6216, or a sense strand sequence thereof having 1, 2, 3, or 4 nucleoside substitutions, additions, or deletions. In some embodiments, the sense strand sequence comprises or consists of the sequence of SEQ ID NO: 6216, or a sense strand sequence thereof having 1 or 2 nucleoside substitutions, additions, or deletions. In some embodiments, the sense strand sequence comprises or consists of a sequence 100% identical to SEQ ID NO: 6216. The sense strand may comprise a moiety such as a GalNAc moiety or a lipid moiety. In some embodiments, the siRNA comprises an antisense strand having a sequence in accordance with SEQ ID NO: 6275. In some embodiments, the antisense strand sequence comprises or consists of sequence at least 75% identical to SEQ ID NO: 6275, at least 80% identical to SEQ ID NO: 6275, at least 85% identical to SEQ ID NO: 6275, at least 90% identical to SEQ ID NO: 6275, or at least 95% identical to SEQ ID NO: 6275. In some embodiments, the antisense strand sequence comprises or consists of the sequence of SEQ ID NO 6275, or an antisense strand sequence thereof having 1, 2, 3, or 4 nucleoside substitutions, additions, or deletions. In some embodiments, the antisense strand sequence comprises or consists of the sequence of SEQ ID NO: 6275, or an antisense strand sequence thereof having 1 or 2 nucleoside substitutions, additions, or deletions. In some embodiments, the antisense strand sequence comprises or consists of a sequence 100% identical to SEQ ID NO: 6275. The antisense strand may comprise a moiety such as a GalNAc moiety or a lipid moiety.

[0198] In some embodiments, the siRNA comprises a sense strand having a sequence in accordance with SEQ ID NO: 6229. In some embodiments, the sense strand sequence comprises or consists of sequence at least 75% identical to SEQ ID NO: 6229, at least 80% identical to SEQ ID NO: 6229, at least 85% identical to SEQ ID NO: 6229, at least 90% identical to SEQ ID NO: 6229, or at least 95% identical to SEQ ID NO: 6229. In some embodiments, the sense strand sequence comprises or consists of the sequence of SEQ ID NO 6229, or a sense strand sequence thereof having 1, 2, 3, or 4 nucleoside substitutions, additions, or deletions. In some embodiments, the sense strand sequence comprises or consists of the sequence of SEQ ID NO: 6229, or a sense strand sequence thereof having 1 or 2 nucleoside substitutions, additions, or deletions. In some embodiments, the sense strand sequence comprises or consists of a sequence 100% identical to SEQ ID NO: 6229. The sense strand may comprise a moiety such as a GalNAc moiety or a lipid moiety. In some embodiments, the siRNA comprises an antisense strand having a sequence in accordance with SEQ ID NO: 6288. In some embodiments, the antisense strand sequence comprises or consists of sequence at least 75% identical to SEQ ID NO: 6288, at least 80% identical to SEQ ID NO: 6288, at least 85% identical to SEQ ID NO: 6288, at least 90% identical to SEQ ID NO: 6288, or at least 95% identical to SEQ ID NO: 6288. In some embodiments, the antisense strand sequence comprises or consists of the sequence of SEQ ID NO 6288, or an antisense strand sequence thereof having 1, 2, 3, or 4 nucleoside substitutions, additions, or deletions. In some embodiments, the antisense strand sequence comprises or consists of the sequence of SEQ ID NO: 6288, or an antisense strand sequence thereof having 1 or 2 nucleoside substitutions, additions, or deletions. In some embodiments, the antisense strand sequence comprises or consists of a sequence 100% identical to SEQ ID NO: 6288. The antisense strand may comprise a moiety such as a GalNAc moiety or a lipid moiety.

[0199] In some embodiments, the siRNA comprises a sense strand having a sequence in accordance with SEQ ID NO: 6234. In some embodiments, the sense strand sequence comprises or consists of sequence at least 75% identical to SEQ ID NO: 6234, at least 80% identical to SEQ ID NO: 6234, at least 85% identical to SEQ ID NO: 6234, at least 90% identical to SEQ ID NO: 6234, or at least 95% identical to SEQ ID NO: 6234. In some embodiments, the sense strand sequence comprises or consists of the sequence of SEQ ID NO 6234, or a sense strand sequence thereof having 1, 2, 3, or 4 nucleoside substitutions, additions, or deletions. In some embodiments, the sense strand sequence comprises or consists of the sequence of SEQ ID NO: 6234, or a sense strand sequence thereof having 1 or 2 nucleoside substitutions, additions, or deletions. In some embodiments, the sense strand sequence comprises or consists of a sequence 100% identical to SEQ ID NO: 6234. The sense strand may comprise a moiety such as a GalNAc moiety or a lipid moiety. In some embodiments, the siRNA comprises an antisense strand having a sequence in accordance with SEQ ID NO: 6293. In some embodiments, the antisense strand sequence comprises or consists of sequence at least 75% identical to SEQ ID NO: 6293, at least 80% identical to SEQ ID NO: 6293, at least 85% identical to SEQ ID NO: 6293, at least 90% identical to SEQ ID NO: 6293, or at least 95% identical to SEQ ID NO: 6293. In some embodiments, the antisense strand sequence comprises or consists of the sequence of SEQ ID NO 6293, or an antisense strand sequence thereof having 1, 2, 3, or 4 nucleoside substitutions, additions, or deletions. In some embodiments, the antisense strand sequence comprises or consists of the sequence of SEQ ID NO: 6293, or an antisense strand sequence thereof having 1 or 2 nucleoside substitutions, additions, or deletions. In some embodiments, the antisense strand sequence comprises or consists of a sequence 100% identical to SEQ ID NO: 6293. The antisense strand may comprise a moiety such as a GalNAc moiety or a lipid moiety.

[0200] In some embodiments, the siRNA comprises a sense strand having a sequence in accordance with SEQ ID NO: 6238. In some embodiments, the sense strand sequence comprises or consists of sequence at least 75% identical to SEQ ID NO: 6238, at least 80% identical to SEQ ID NO: 6238, at least 85% identical to SEQ ID NO: 6238, at least 90% identical to SEQ ID NO: 6238, or at least 95% identical to SEQ ID NO: 6238. In some embodiments, the sense strand sequence comprises or consists of the sequence of SEQ ID NO 6238, or a sense strand sequence thereof having 1, 2, 3, or 4 nucleoside substitutions, additions, or deletions. In some embodiments, the sense strand sequence comprises or consists of the sequence of SEQ ID NO: 6238, or a sense strand sequence thereof having 1 or 2 nucleoside substitutions, additions, or deletions. In some embodiments, the sense strand sequence comprises or consists of a sequence 100% identical to SEQ ID NO: 6238. The sense strand may comprise a moiety such as a GalNAc moiety or a lipid moiety. In some embodiments, the siRNA comprises an antisense strand having a sequence in accordance with SEQ ID NO: 6297. In some embodiments, the antisense strand sequence comprises or consists of sequence at least 75% identical to SEQ ID NO: 6297, at least 80% identical to SEQ ID NO: 6297, at least 85% identical to SEQ ID NO: 6297, at least 90% identical to SEQ ID NO: 6297, or at least 95% identical to SEQ ID NO: 6297. In some embodiments, the antisense strand sequence comprises or consists of the sequence of SEQ ID NO 6297, or an antisense strand sequence thereof having 1, 2, 3, or 4 nucleoside substitutions, additions, or deletions. In some embodiments, the antisense strand sequence comprises or consists of the sequence of SEQ ID NO: 6297, or an antisense strand sequence thereof having 1 or 2 nucleoside substitutions, additions, or deletions. In some embodiments, the antisense strand sequence comprises or consists of a sequence 100% identical to SEQ ID NO: 6297. The antisense strand may comprise a moiety such as a GalNAc moiety or a lipid moiety.

[0201] In some embodiments, the siRNA comprises a sense strand having a sequence in accordance with SEQ ID NO: 6244. In some embodiments, the sense strand sequence comprises or consists of sequence at least 75% identical to SEQ ID NO: 6244, at least 80% identical to SEQ ID NO: 6244, at least 85% identical to SEQ ID NO: 6244, at least 90% identical to SEQ ID NO: 6244, or at least 950% identical to SEQ ID NO: 6244. In some embodiments, the sense strand sequence comprises or consists of the sequence of SEQ ID NO 6244, or a sense strand sequence thereof having 1, 2, 3, or 4 nucleoside substitutions, additions, or deletions. In some embodiments, the sense strand sequence comprises or consists of the sequence of SEQ ID NO: 6244, or a sense strand sequence thereof having 1 or 2 nucleoside substitutions, additions, or deletions. In some embodiments, the sense strand sequence comprises or consists of a sequence 100% identical to SEQ ID NO: 6244. The sense strand may comprise a moiety such as a GalNAc moiety or a lipid moiety. In some embodiments, the siRNA comprises an antisense strand having a sequence in accordance with SEQ ID NO: 6303. In some embodiments, the antisense strand sequence comprises or consists of sequence at least 75% identical to SEQ ID NO: 6303, at least 80% identical to SEQ ID NO: 6303, at least 85% identical to SEQ ID NO: 6303, at least 90% identical to SEQ ID NO: 6303, or at least 95% identical to SEQ ID NO: 6303. In some embodiments, the antisense strand sequence comprises or consists of the sequence of SEQ ID NO 6303, or an antisense strand sequence thereof having 1, 2, 3, or 4 nucleoside substitutions, additions, or deletions. In some embodiments, the antisense strand sequence comprises or consists of the sequence of SEQ ID NO: 6303, or an antisense strand sequence thereof having 1 or 2 nucleoside substitutions, additions, or deletions. In some embodiments, the antisense strand sequence comprises or consists of a sequence 100% identical to SEQ ID NO: 6303. The antisense strand may comprise a moiety such as a GalNAc moiety or a lipid moiety.

### 4. ASO Modification Patterns

[0202] In some embodiments, the composition comprises an oligonucleotide that inhibits the expression of MST1, wherein the oligonucleotide comprises an antisense oligonucleotide (ASO). In some embodiments, the ASO comprises modification pattern ASO1: 5′-nsnsnsnsnsdNsdNsdNsdNsdNsdNsdNsdNsdNsdNsnsnsnsnsn-3′ (SEQ ID NO: 6181), wherein “dN” is any deoxynucleotide, “n” is a 2′O-methyl or 2′O-methoxyethyl-modified nucleoside, and “s” is a phosphorothioate linkage. In some embodiments, the ASO comprises modification pattern 1S, 2S, 3S, 4S, 5S, 6S, 7S, 8S, 9S, 10S, 1S, 12S, 13S, 14S, 15S, 16S, 17S, 18S, 19S, 20S, 21S, 22S, 23S, 24S, 25S, 26S, 27S, 28S, 29S, 30S, 31S, 32S, 33S, 34S, 35S, 1AS, 2AS, 3AS, 4AS, 5AS, 6AS, 7AS, 8AS, 9AS, 10AS, 11AS, 12AS, 12AS, 14AS, 15AS, 16AS, 17AS, 18AS, 19AS, 20AS, or, 21AS.

[0203] D. Formulations

[0204] In some embodiments, the composition is a pharmaceutical composition. In some embodiments, the composition is sterile. In some embodiments, the composition further comprises a pharmaceutically acceptable carrier.

[0205] In some embodiments, the pharmaceutically acceptable carrier comprises water. In some embodiments, the pharmaceutically acceptable carrier comprises a buffer. In some embodiments, the pharmaceutically acceptable carrier comprises a saline solution. In some embodiments, the pharmaceutically acceptable carrier comprises water, a buffer, or a saline solution. In some embodiments, the composition comprises a liposome. In some embodiments, the pharmaceutically acceptable carrier comprises liposomes, lipids, nanoparticles, proteins, protein-antibody complexes, peptides, cellulose, nanogel, or a combination thereof. In some embodiments, the oligonucleotide is combined with lipids, nanoparticles, polymers, liposomes, micelles, or another delivery system.

[0206] In some embodiments, the composition is formulated for delivery to a subject's lungs. In some embodiments, the composition is formulated for inhalation. In some embodiments, the composition is formulated for aerosolization. In some embodiments, the composition is formulated for administration by a nebulizer.

### II. METHODS AND USES

[0207] Disclosed herein, in some embodiments, are methods of administering a composition described herein to a subject. Some embodiments relate to use a composition described herein, such as administering the composition to a subject.

[0208] Some embodiments relate to a method of treating a disorder in a subject in need thereof. Some embodiments relate to use of a composition described herein in the method of treatment. Some embodiments include administering a composition described herein to a subject with the disorder. In some embodiments, the administration treats the disorder in the subject. In some embodiments, the composition treats the disorder in the subject.

[0209] In some embodiments, the treatment comprises prevention, inhibition, or reversion of the disorder in the subject. Some embodiments relate to use of a composition described herein in the method of preventing, inhibiting, or reversing the disorder. Some embodiments relate to a method of preventing, inhibiting, or reversing a disorder a disorder in a subject in need thereof. Some embodiments include administering a composition described herein to a subject with the disorder. In some embodiments, the administration prevents, inhibits, or reverses the disorder in the subject. In some embodiments, the composition prevents, inhibits, or reverses the disorder in the subject.

[0210] Some embodiments relate to a method of preventing a disorder a disorder in a subject in need thereof. Some embodiments relate to use of a composition described herein in the method of preventing the disorder. Some embodiments include administering a composition described herein to a subject with the disorder. In some embodiments, the administration prevents the disorder in the subject. In some embodiments, the composition prevents the disorder in the subject.

[0211] Some embodiments relate to a method of inhibiting a disorder a disorder in a subject in need thereof. Some embodiments relate to use of a composition described herein in the method of inhibiting the disorder. Some embodiments include administering a composition described herein to a subject with the disorder. In some embodiments, the administration inhibits the disorder in the subject. In some embodiments, the composition inhibits the disorder in the subject.

[0212] Some embodiments relate to a method of reversing a disorder a disorder in a subject in need thereof. Some embodiments relate to use of a composition described herein in the method of reversing the disorder. Some embodiments include administering a composition described herein to a subject with the disorder. In some embodiments, the administration reverses the disorder in the subject. In some embodiments, the composition reverses the disorder in the subject.

[0213] In some embodiments, the administration is systemic. In some embodiments, the administration is intravenous. In some embodiments, the administration is by injection. In some embodiments, the administration is to a subject's lungs. In some embodiments, the administration is by inhalation. In some embodiments, the administration is performed using a nebulizer.

[0214] A. Disorders

[0215] Some embodiments of the methods described herein include treating a disorder in a subject in need thereof. In some embodiments, the disorder is a lung disorder. Non-limiting examples of lung disorders include chronic obstructive pulmonary disease (COPD), acute exacerbation of COPD, emphysema, chronic bronchitis, asthma, status asthmaticus, asthma-COPD overlap syndrome (ACOS), cough, lung cancer, interstitial lung disease, or pulmonary fibrosis. The lung disorder may include an obstructive airway disorder such as COPD or asthma. In some embodiments, the lung disorder includes COPD. In some embodiments, the lung disorder includes acute exacerbation of COPD. In some embodiments, the lung disorder includes emphysema. In some embodiments, the lung disorder includes chronic bronchitis. In some embodiments, the lung disorder includes asthma. In some embodiments, the lung disorder includes status asthmaticus. In some embodiments, the lung disorder includes ACOS. In some embodiments, the lung disorder includes cough. In some embodiments, the lung disorder includes lung cancer. In some embodiments, the lung disorder includes interstitial lung disease. In some embodiments, the lung disorder includes pulmonary fibrosis. The lung disorder may result from smoking, or from smoke inhalation.

[0216] B. Subjects

[0217] Some embodiments of the methods described herein include treatment of a subject. Non-limiting examples of subjects include vertebrates, animals, mammals, dogs, cats, cattle, rodents, mice, rats, primates, monkeys, and humans. In some embodiments, the subject is a vertebrate. In some embodiments, the subject is an animal. In some embodiments, the subject is a mammal. In some embodiments, the subject is a dog. In some embodiments, the subject is a cat. In some embodiments, the subject is a cattle. In some embodiments, the subject is a mouse. In some embodiments, the subject is a rat. In some embodiments, the subject is a primate. In some embodiments, the subject is a monkey. In some embodiments, the subject is an animal, a mammal, a dog, a cat, cattle, a rodent, a mouse, a rat, a primate, or a monkey. In some embodiments, the subject is a human. In some embodiments, the subject is male. In some embodiments, the subject is female. In some embodiments, the subject is an adult (e.g. at least 18 years old).

[0218] C. Baseline Measurements

[0219] Some embodiments of the methods described herein include obtaining a baseline measurement from a subject. For example, in some embodiments, a baseline measurement is obtained from the subject prior to treating the subject. Non-limiting examples of baseline measurements include a baseline lung function measurement, a baseline leukocyte measurement, a baseline chronic obstructive pulmonary disease (COPD) exacerbation measurement, a baseline asthma exacerbation measurement, a baseline MSP measurement, or a baseline MST1 mRNA measurement.

[0220] In some embodiments, the baseline measurement is obtained directly from the subject. In some embodiments, the baseline measurement is obtained by observation, for example by observation of the subject or of the subject's tissue. In some embodiments, the baseline measurement is obtained noninvasively using an imaging device.

[0221] In some embodiments, the baseline measurement is obtained in a sample from the subject. In some embodiments, the baseline measurement is obtained in one or more histological tissue sections. In some embodiments, the baseline measurement is obtained by performing an assay such as an immunoassay, a colorimetric assay, or a fluorescence assay, on the sample obtained from the subject. In some embodiments, the baseline measurement is obtained by an immunoassay, a colorimetric assay, a fluorescence assay, or a chromatography (e.g. HPLC) assay. In some embodiments, the baseline measurement is obtained by PCR.

[0222] In some embodiments, the baseline measurement is a baseline lung function measurement. In some embodiments, the baseline measurement is a baseline spirometry measurement. The baseline spirometry measurement may be obtained using a spirometer. The spirometer may generate a spirogram comprising a volume-time curve or a flow-volume loop. In some embodiments, the baseline spirometry measurement is obtained by having the subject breathe into a spirometer sensor. Examples of baseline spirometry measurements may include a baseline forced expiratory volume in 1 second (FEV1) measurement, a baseline forced expiratory volume in 1 second percent predicted (FEV1pp) measurement, a baseline forced vital capacity (FVC) measurement, a baseline FEV1/FVC ratio, a baseline forced expiratory volume, or a baseline peak expiratory flow measurement. In some embodiments, the baseline measurement includes a baseline forced expiratory volume in 1 second (FEV1) measurement. In some embodiments, the baseline measurement includes a baseline forced expiratory volume in 1 second percent predicted (FEV1pp) measurement. In some embodiments, the baseline measurement includes a baseline forced vital capacity (FVC) measurement. In some embodiments, the baseline measurement includes a baseline FEV1/FVC ratio. The baseline FEV1/FVC ratio may be below 70% or below 80%, in some cases. In some embodiments, the baseline measurement includes a baseline forced expiratory volume. In some embodiments, the baseline measurement includes a baseline peak expiratory flow measurement.

[0223] In some embodiments, the baseline measurement includes a baseline leukocyte measurement. In some embodiments, the baseline leukocyte measurement includes a baseline circulating leukocyte measurement. In some embodiments, the baseline leukocyte measurement includes a baseline lung tissue leukocyte measurement. In some embodiments, the baseline leukocyte measurement includes a baseline lung fluid (e.g. bronchoalveolar fluid) leukocyte measurement. In some embodiments, the baseline leukocyte measurement includes a baseline leukocyte count. In some embodiments, the baseline leukocyte measurement includes a baseline leukocyte concentration. In some embodiments, the baseline leukocyte measurement includes a baseline leukocyte percentage. The percentage may be in relation to other cells. Examples of leukocytes that may be included in the baseline leukocyte measurement include neutrophils, eosinophils, basophils, monocytes, or lymphocytes. The leukocytes may include neutrophils. The leukocytes may include eosinophils. The leukocytes may include basophils. The leukocytes may include monocytes. The leukocytes may include lymphocytes. In some embodiments, the baseline leukocyte measurement is obtained by an assay such as an immunoassay, a colorimetric assay, or a fluorescence assay. In some embodiments, the baseline leukocyte measurement is high, relative to a control leukocyte measurement. For example, a subject who has not been treated with a composition described herein and who has an inflammatory lung disorder may have a high leukocyte count in the subject's blood or lungs. In some embodiments, the baseline leukocyte measurement is determined in lung tissue or a lung fluid such as bronchoalveolar fluid, and may include a baseline measurement of neutrophils and macrophages.

[0224] In some embodiments, the baseline measurement includes a baseline chronic obstructive pulmonary disease (COPD) exacerbation measurement. A COPD exacerbation may include a COPD flare-up such as an acute increase in severity of a respiratory symptom such as difficulty breathing. The baseline COPD exacerbation measurement may include a baseline number of COPD flare-ups, and may be included in a given time frame such as flare-ups per day, week, month, or year. The baseline COPD exacerbation measurement may include a baseline frequency of COPD exacerbations. The baseline COPD exacerbation measurement may include a baseline measurement of worsening of a respiratory symptom, such as increased dyspnea, cough, sputum volume, or sputum purulence. The baseline COPD exacerbation measurement may include a baseline measurement of an event such as when a the subject's conditions change enough to require a change in treatment. The baseline COPD exacerbation measurement may include a baseline peak flow test, a baseline breath nitric oxide measurement, or a baseline blood oxygen level test.

[0225] In some embodiments, the baseline measurement includes a baseline asthma exacerbation measurement. An asthma exacerbation may include an asthma attack, for example narrowing of a bronchial tube that causes difficulty breathing. The baseline asthma exacerbation measurement may include a baseline number of number of asthma attacks, and may be included in a given time frame such as flare-ups per day, week, month, or year. The baseline asthma exacerbation measurement may include a baseline frequency of asthma exacerbations. The baseline asthma exacerbation measurement may include a baseline bronchial tube measurement such as a bronchial tube diameter, a bronchial tube circumference, or a bronchial tube area measurement. The baseline asthma exacerbation measurement may include a baseline amount of bronchial tube narrowing, such as a percent constriction. The baseline asthma exacerbation measurement may include a baseline wheezing measurement, a baseline coughing measurement, a baseline chest tightening measurement, a baseline shortness of breath measurement, a baseline agitation measurement, a baseline hyperventilation measurement, a baseline heart rate measurement, a baseline lung function measurement, or a baseline measurement of difficulty speaking or breathing. The baseline asthma exacerbation measurement may include a baseline peak flow test, a baseline breath nitric oxide measurement, or a baseline blood oxygen level test.

[0226] In some embodiments, the baseline measurement is a baseline MSP measurement. In some embodiments, the baseline MSP measurement comprises a baseline MSP level. In some embodiments, the baseline MSP level is indicated as a mass or percentage of MSP per sample weight. In some embodiments, the baseline MSP level is indicated as a mass or percentage of MSP per sample volume. In some embodiments, the baseline MSP level is indicated as a mass or percentage of MSP per total protein within the sample. In some embodiments, the baseline MSP measurement is a baseline circulating MSP measurement. In some embodiments, the baseline MSP measurement is obtained by an assay such as an immunoassay, a colorimetric assay, or a fluorescence assay.

[0227] In some embodiments, the baseline measurement is a baseline MST1 mRNA measurement. In some embodiments, the baseline MST1 mRNA measurement comprises a baseline MST1 mRNA level. In some embodiments, the baseline MST1 mRNA level is indicated as an amount or percentage of MST1 mRNA per sample weight. In some embodiments, the baseline MST1 mRNA level is indicated as an amount or percentage of MST1 mRNA per sample volume. In some embodiments, the baseline MST1 mRNA level is indicated as an amount or percentage of MST1 mRNA per total mRNA within the sample. In some embodiments, the baseline MST1 mRNA level is indicated as an amount or percentage of MST1 mRNA per total nucleic acids within the sample. In some embodiments, the baseline MST1 mRNA level is indicated relative to another mRNA level, such as an mRNA level of a housekeeping gene, within the sample. In some embodiments, the baseline MST1 mRNA measurement is obtained by an assay such as a polymerase chain reaction (PCR) assay. In some embodiments, the PCR comprises quantitative PCR (qPCR). In some embodiments, the PCR comprises reverse transcription of the MST1 mRNA.

[0228] Some embodiments of the methods described herein include obtaining a sample from a subject. In some embodiments, the baseline measurement is obtained in a sample obtained from the subject. In some embodiments, the sample is obtained from the subject prior to administration or treatment of the subject with a composition described herein. In some embodiments, a baseline measurement is obtained in a sample obtained from the subject prior to administering the composition to the subject.

[0229] In some embodiments, the sample comprises a fluid. In some embodiments, the sample is a fluid sample. For example, the baseline MSP measurement may be obtained in a fluid sample obtained from the patient. In some embodiments, the baseline MST1 mRNA measurement is obtained in a fluid sample. In some embodiments, the sample is a blood, plasma, or serum sample. In some embodiments, the baseline MST1 mRNA measurement is obtained in a fluid sample. In some embodiments, the sample comprises blood. In some embodiments, the sample is a blood sample. In some embodiments, the sample is a whole-blood sample. In some embodiments, the blood is fractionated or centrifuged. In some embodiments, the sample comprises plasma. In some embodiments, the sample is a plasma sample. A blood sample may be a plasma sample. In some embodiments, the sample comprises serum. In some embodiments, the sample is a serum sample. A blood sample may be a serum sample. In some embodiments, the fluid sample includes a lung fluid sample. In some embodiments, the lung fluid sample includes alveolar fluid. In some embodiments, the lung fluid sample includes bronchial fluid. In some embodiments, the lung fluid sample includes bronchoalveolar fluid. The lung fluid may be obtained via a lavage method such as a bronchoalveolar lavage method. The lavage method may include the use of a bronchoscope.

[0230] In some embodiments, the sample comprises a tissue. In some embodiments, the sample is a tissue sample. In some embodiments, the tissue comprises liver, lung, or vascular tissue. For example, the baseline MST1 mRNA measurement, or the baseline MSP measurement, may be obtained in a lung or liver sample obtained from the patient. In some embodiments, the tissue comprises liver tissue. The liver may include hepatocytes. In some embodiments, the tissue comprises lung tissue. The lung may include lung epithelial cells, type I alveolar cells, type II alveolar cells, macrophages, alveolar macrophages, goblet cells, club cells, or fibroblasts. In some embodiments, the tissue comprises vascular tissue. The vascular tissue may include vascular endothelial cells. For example, the lung tissue may include vascular endothelial cells.

[0231] In some embodiments, the sample includes cells. In some embodiments, the sample comprises a cell. In some embodiments, the cell is a liver cell. In some embodiments, the liver cell is a hepatocyte. In some embodiments, the cell is a lung cell. In some embodiments, the lung cell is a lung epithelial cell. In some embodiments, the lung cell is a type I alveolar cell. In some embodiments, the lung cell is a type II alveolar cell. In some embodiments, the lung cell is a macrophage. In some embodiments, the lung cell is a alveolar macrophage. In some embodiments, the lung cell is a goblet cell. In some embodiments, the lung cell is a club cell. In some embodiments, the lung cell is a fibroblast. In some embodiments, the cell is a vasculature cell. In some embodiments, the vasculature cell is an endothelial cell.

[0232] D. Effects

[0233] In some embodiments, the composition or administration of the composition affects a measurement such as a lung function measurement, a leukocyte measurement, a chronic obstructive pulmonary disease (COPD) exacerbation measurement, an asthma exacerbation measurement, a MSP measurement (for example, circulating or tissue MSP levels), or a MST1 mRNA measurement, relative to the baseline measurement.

[0234] Some embodiments of the methods described herein include obtaining the measurement from a subject. For example, the measurement may be obtained from the subject after treating the subject. In some embodiments, the measurement is obtained in a second sample (such as a fluid or tissue sample described herein) obtained from the subject after the composition is administered to the subject. In some embodiments, the measurement is an indication that the disorder has been treated.

[0235] In some embodiments, the measurement is obtained directly from the subject. In some embodiments, the measurement is obtained noninvasively using an imaging device. In some embodiments, the measurement is obtained in a second sample from the subject. In some embodiments, the measurement is obtained in one or more histological tissue sections. In some embodiments, the measurement is obtained by performing an assay on the second sample obtained from the subject. In some embodiments, the measurement is obtained by an assay, such as an assay described herein. In some embodiments, the assay is an immunoassay, a colorimetric assay, a fluorescence assay, a chromatography (e.g. HPLC) assay, or a PCR assay. In some embodiments, the measurement is obtained by an assay such as an immunoassay, a colorimetric assay, a fluorescence assay, or a chromatography (e.g. HPLC) assay. In some embodiments, the measurement is obtained by PCR. In some embodiments, the measurement is obtained by histology. In some embodiments, the measurement is obtained by observation. In some embodiments, additional measurements are made, such as in a 3rd sample, a 4th sample, or a fifth sample.

[0236] In some embodiments, the measurement is obtained within 1 hour, within 2 hours, within 3 hours, within 4 hours, within 5 hours, within 6 hours, within 12 hours, within 18 hours, or within 24 hours after the administration of the composition. In some embodiments, the measurement is obtained within 1 day, within 2 days, within 3 days, within 4 days, within 5 days, within 6 days, or within 7 days after the administration of the composition. In some embodiments, the measurement is obtained within 1 week, within 2 weeks, within 3 weeks, within 1 month, within 2 months, within 3 months, within 6 months, within 1 year, within 2 years, within 3 years, within 4 years, or within 5 years after the administration of the composition. In some embodiments, the measurement is obtained after 1 hour, after 2 hours, after 3 hours, after 4 hours, after 5 hours, after 6 hours, after 12 hours, after 18 hours, or after 24 hours after the administration of the composition. In some embodiments, the measurement is obtained after 1 day, after 2 days, after 3 days, after 4 days, after 5 days, after 6 days, or after 7 days after the administration of the composition. In some embodiments, the measurement is obtained after 1 week, after 2 weeks, after 3 weeks, after 1 month, after 2 months, after 3 months, after 6 months, after 1 year, after 2 years, after 3 years, after 4 years, or after 5 years, following the administration of the composition.

[0237] In some embodiments, the composition reduces the measurement relative to the baseline measurement. For example, an adverse phenotype of a lung disorder may be reduced upon administration of the composition. In some embodiments, the reduction is measured in a second sample obtained from the subject after administering the composition to the subject. In some embodiments, the reduction is measured directly in the subject after administering the composition to the subject. In some embodiments, the measurement is decreased by about 2.5% or more, about 5% or more, or about 7.5% or more, relative to the baseline measurement. In some embodiments, the measurement is decreased by about 10% or more, relative to the baseline measurement. In some embodiments, the measurement is decreased by about 20% or more, about 30% or more, about 40% or more, about 50% or more, about 60% or more, about 70% or more, about 80% or more, about 90% or more, relative to the baseline measurement. In some embodiments, the measurement is decreased by no more than about 20.5%, no more than about 5%, or no more than about 7.5%, relative to the baseline measurement. In some embodiments, the measurement is decreased by no more than about 10%, relative to the baseline measurement. In some embodiments, the measurement is decreased by no more than about 20%, no more than about 30%, no more than about 40%, no more than about 50%, no more than about 60%, no more than about 70%, no more than about 80%, no more than about 90%, or no more than about 100% relative to the baseline measurement. In some embodiments, the measurement is decreased by 2.5%, 5%, 7.5%, 10%, 20%, 30%, 40%, 50%, 60%, 70%, 80%, 90%, or 100%, or by a range defined by any of the two aforementioned percentages.

[0238] In some embodiments, the composition increases the measurement relative to the baseline measurement. For example, a protective lung phenotype may be increased upon administration of the composition. In some embodiments, the increase is measured in a second sample obtained from the subject after administering the composition to the subject. In some embodiments, the increase is measured directly in the subject after administering the composition to the subject. In some embodiments, the measurement is increased by about 2.5% or more, about 5% or more, or about 7.5% or more, relative to the baseline measurement. In some embodiments, the measurement is increased by about 10% or more, relative to the baseline measurement. In some embodiments, the measurement is increased by about 20% or more, about 30% or more, about 40% or more, about 50% or more, about 60% or more, about 70% or more, about 80% or more, about 90% or more, relative to the baseline measurement. In some embodiments, the measurement is increased by about 100% or more, increased by about 250% or more, increased by about 500% or more, increased by about 750% or more, or increased by about 1000% or more, relative to the baseline measurement. In some embodiments, the measurement is increased by no more than about 2.5%, no more than about 5%, or no more than about 7.5%, relative to the baseline measurement. In some embodiments, the measurement is increased by no more than about 10%, relative to the baseline measurement. In some embodiments, the measurement is increased by no more than about 20%, no more than about 30%, no more than about 40%, no more than about 50%, no more than about 60%, no more than about 70%, no more than about 80%, no more than about 90%, or no more than about 100% relative to the baseline measurement. In some embodiments, the measurement is increased by no more than about 100%, increased by no more than about 250%, increased by no more than about 500%, increased by no more than about 750%, or increased by no more than about 1000%, relative to the baseline measurement. In some embodiments, the measurement is increased by 2.5%, 5%, 7.5%, 10%, 20%, 30%, 40%, 50%, 60%, 70%, 80%, 90%, 100%, 250%, 500%, 750%, or 1000%, or by a range defined by any of the two aforementioned percentages.

[0239] In some embodiments, the measurement is a lung function measurement. In some embodiments, the measurement is a spirometry measurement. The spirometry measurement may be obtained using a spirometer. The spirometer may generate a spirogram comprising a volume-time curve or a flow-volume loop. In some embodiments, the spirometry measurement is obtained by having the subject breathe into a spirometer sensor. Examples of spirometry measurements may include a forced expiratory volume in 1 second (FEV1) measurement, a forced expiratory volume in 1 second percent predicted (FEV1pp) measurement, a forced vital capacity (FVC) measurement, a FEV1/FVC ratio, a forced expiratory volume, or a peak expiratory flow measurement. In some embodiments, the measurement includes a forced expiratory volume in 1 second (FEV1) measurement. In some embodiments, the measurement includes a forced expiratory volume in 1 second percent predicted (FEV1pp) measurement. In some embodiments, the measurement includes a forced vital capacity (FVC) measurement. In some embodiments, the measurement includes a FEV1/FVC ratio. The FEV1/FVC ratio may be below 70% or below 80%, in some cases. In some embodiments, the measurement includes a forced expiratory volume. In some embodiments, the measurement includes a peak expiratory flow measurement.

[0240] In some embodiments, the composition increases the lung function measurement relative to the baseline lung function measurement. In some embodiments, the increase is measured directly in the subject after administering the composition to the subject. In some embodiments, the lung function measurement is increased by about 2.5% or more, about 5% or more, or about 7.5% or more, relative to the baseline lung function measurement. In some embodiments, the lung function measurement is increased by about 10% or more, relative to the baseline lung function measurement. In some embodiments, the lung function measurement is increased by about 20% or more, about 30% or more, about 40% or more, about 50% or more, about 60% or more, about 70% or more, about 80% or more, about 90% or more, relative to the baseline lung function measurement. In some embodiments, the lung function measurement is increased by about 100% or more, increased by about 250% or more, increased by about 500% or more, increased by about 750% or more, or increased by about 1000% or more, relative to the baseline lung function measurement. In some embodiments, the lung function measurement is increased by no more than about 2.5%, no more than about 5%, or no more than about 7.5%, relative to the baseline lung function measurement. In some embodiments, the lung function measurement is increased by no more than about 10%, relative to the baseline lung function measurement. In some embodiments, the lung function measurement is increased by no more than about 20%, no more than about 30%, no more than about 40%, no more than about 50%, no more than about 60%, no more than about 70%, no more than about 80%, no more than about 90%, or no more than about 100% relative to the baseline lung function measurement. In some embodiments, the lung function measurement is increased by no more than about 100%, increased by no more than about 250%, increased by no more than about 500%, increased by no more than about 750%, or increased by no more than about 1000%, relative to the baseline lung function measurement. In some embodiments, the lung function measurement is increased by 2.5%, 5%, 7.5%, 10%, 20%, 30%, 40%, 50%, 60%, 70%, 80%, 90%, 100%, 250%, 500%, 750%, or 1000%, or by a range defined by any of the two aforementioned percentages.

[0241] In some embodiments, the measurement includes a leukocyte measurement. In some embodiments, the leukocyte measurement includes a circulating leukocyte measurement. In some embodiments, the leukocyte measurement includes a lung tissue leukocyte measurement. In some embodiments, the leukocyte measurement includes a lung fluid (e.g. bronchoalveolar fluid)leukocyte measurement. In some embodiments, the leukocyte measurement includes a leukocyte count. In some embodiments, the leukocyte measurement includes a leukocyte concentration. In some embodiments, the leukocyte measurement includes a leukocyte percentage. The percentage may be in relation to other cells. Examples of leukocytes that may be included in the leukocyte measurement include neutrophils, eosinophils, basophils, monocytes, or lymphocytes. The leukocytes may include neutrophils. The leukocytes may include eosinophils. The leukocytes may include basophils. The leukocytes may include monocytes. The leukocytes may include lymphocytes. In some embodiments, the leukocyte measurement is obtained by an assay such as an immunoassay, a colorimetric assay, or a fluorescence assay. In some embodiments, the leukocyte measurement is normal, relative to a control leukocyte measurement. For example, a subject who has been treated with a composition described herein and who has an inflammatory lung disorder may have had a high leukocyte count that is now low or normal. In some embodiments, the leukocyte measurement is determined in lung tissue or a lung fluid such as bronchoalveolar fluid, and may include a measurement of neutrophils and macrophages.

[0242] In some embodiments, the composition reduces the leukocyte measurement relative to the baseline leukocyte measurement. In some embodiments, the reduction is measured in a second sample obtained from the subject after administering the composition to the subject. In some embodiments, the leukocyte measurement is decreased by about 2.5% or more, about 5% or more, or about 7.5% or more, relative to the baseline leukocyte measurement. In some embodiments, the leukocyte measurement is decreased by about 10% or more, relative to the baseline leukocyte measurement. In some embodiments, the leukocyte measurement is decreased by about 20% or more, about 30% or more, about 40% or more, about 50% or more, about 60% or more, about 70% or more, or about 80% or more, relative to the baseline leukocyte measurement. In some embodiments, the leukocyte measurement is decreased by no more than about 2.5%, no more than about 5%, or no more than about 7.5%, relative to the baseline leukocyte measurement. In some embodiments, the leukocyte measurement is decreased by no more than about 10%, relative to the baseline leukocyte measurement. In some embodiments, the leukocyte measurement is decreased by no more than about 20%, no more than about 30%, no more than about 40%, no more than about 50%, no more than about 60%, no more than about 70%, or no more than about 80%, relative to the baseline leukocyte measurement. In some embodiments, the leukocyte measurement is decreased by 2.5%, 5%, 7.5%, 10, 20%, 30%, 40%, 50%, 60%, 70%, 80%, 90%, or 100%, or by a range defined by any of the two aforementioned percentages. In some embodiments, the leukocyte measurement is increased by any of the aforementioned percentages or ranges of percentages, relative to the baseline leukocyte measurement.

[0243] In some embodiments, the measurement includes a chronic obstructive pulmonary disease (COPD) exacerbation measurement. A COPD exacerbation may include a COPD flare-up such as an acute increase in severity of a respiratory symptom such as difficulty breathing. The COPD exacerbation measurement may include a number of COPD flare-ups, and may be included in a given time frame such as flare-ups per day, week, month, or year. The COPD exacerbation measurement may include a frequency of COPD exacerbations. The COPD exacerbation measurement may include a measurement of worsening of a respiratory symptom, such as increased dyspnea, cough, sputum volume, or sputum purulence. The COPD exacerbation measurement may include a measurement of an event such as when a the subject's conditions change enough to require a change in treatment. The COPD exacerbation measurement may include a peak flow test, a breath nitric oxide measurement, or a blood oxygen level test.

[0244] In some embodiments, the composition reduces the COPD exacerbation measurement relative to the baseline COPD exacerbation measurement. In some embodiments, the reduction is measured in a second sample obtained from the subject after administering the composition to the subject. In some embodiments, the reduction is measured directly in the subject after administering the composition to the subject. In some embodiments, the COPD exacerbation measurement is decreased by about 2.5% or more, about 5% or more, or about 7.5% or more, relative to the baseline COPD exacerbation measurement. In some embodiments, the COPD exacerbation measurement is decreased by about 10% or more, relative to the baseline COPD exacerbation measurement. In some embodiments, the COPD exacerbation measurement is decreased by about 20% or more, about 30% or more, about 40% or more, about 50% or more, about 60% or more, about 70% or more, about 80% or more, about 90% or more, relative to the baseline COPD exacerbation measurement. In some embodiments, the COPD exacerbation measurement is decreased by no more than about 2.5%, no more than about 5%, or no more than about 7.5%, relative to the baseline COPD exacerbation measurement. In some embodiments, the COPD exacerbation measurement is decreased by no more than about 10%, relative to the baseline COPD exacerbation measurement. In some embodiments, the COPD exacerbation measurement is decreased by no more than about 20%, no more than about 30%, no more than about 40%, no more than about 50%, no more than about 60%, no more than about 70%, no more than about 80%, no more than about 90%, or no more than about 100% relative to the baseline COPD exacerbation measurement. In some embodiments, the COPD exacerbation measurement is decreased by 2.5%, 5%, 7.5%, 10%, 20%, 30%, 40%, 50%, 60%, 70%, 80%, 90%, or 100%, or by a range defined by any of the two aforementioned percentages.

[0245] In some embodiments, the measurement includes an asthma exacerbation measurement. An asthma exacerbation may include an asthma attack, for example narrowing of a bronchial tube that causes difficulty breathing. The asthma exacerbation measurement may include a number of number of asthma attacks, and may be included in a given time frame such as flare-ups per day, week, month, or year. The asthma exacerbation measurement may include a bronchial tube measurement such as a bronchial tube diameter, a bronchial tube circumference, or a bronchial tube area measurement. The asthma exacerbation measurement may include an amount of bronchial tube narrowing, such as a percent constriction. The asthma exacerbation measurement may include a wheezing measurement, a coughing measurement, a chest tightening measurement, a shortness of breath measurement, a agitation measurement, a hyperventilation measurement, a heart rate measurement, a lung function measurement, or a measurement of difficulty speaking or breathing. The asthma exacerbation measurement may include a peak flow test, a breath nitric oxide measurement, or a blood oxygen level test.

[0246] In some embodiments, the composition reduces the asthma exacerbation measurement relative to the baseline asthma exacerbation measurement. In some embodiments, the reduction is measured in a second sample obtained from the subject after administering the composition to the subject. In some embodiments, the reduction is measured directly in the subject after administering the composition to the subject. In some embodiments, the asthma exacerbation measurement is decreased by about 2.5% or more, about 5% or more, or about 7.5% or more, relative to the baseline asthma exacerbation measurement. In some embodiments, the asthma exacerbation measurement is decreased by about 10% or more, relative to the baseline asthma exacerbation measurement. In some embodiments, the asthma exacerbation measurement is decreased by about 20% or more, about 30% or more, about 40% or more, about 50% or more, about 60% or more, about 70% or more, about 80% or more, about 90% or more, relative to the baseline asthma exacerbation measurement. In some embodiments, the asthma exacerbation measurement is decreased by no more than about 2.5%, no more than about 5%, or no more than about 7.5%, relative to the baseline asthma exacerbation measurement. In some embodiments, the asthma exacerbation measurement is decreased by no more than about 10%, relative to the baseline asthma exacerbation measurement. In some embodiments, the asthma exacerbation measurement is decreased by no more than about 20%, no more than about 30%, no more than about 40%, no more than about 50%, no more than about 60%, no more than about 70%, no more than about 80%, no more than about 90%, or no more than about 100% relative to the baseline asthma exacerbation measurement. In some embodiments, the asthma exacerbation measurement is decreased by 2.5%, 5%, 7.5%, 10%, 20%, 30%, 40%, 50%, 60%, 70%, 80%, 90%, or 100%, or by a range defined by any of the two aforementioned percentages.

[0247] In some embodiments, the measurement is an MSP measurement. In some embodiments, the MSP measurement comprises an MSP level. In some embodiments, the MSP level is indicated as amass or percentage of MSP per sample weight. In some embodiments, the MSP level is indicated as a mass or percentage of MSP per sample volume. In some embodiments, the MSP level is indicated as a mass or percentage of MSP per total protein within the sample. In some embodiments, the MSP measurement is a circulating MSP measurement. In some embodiments, the MSP measurement is obtained by an assay such as an immunoassay, a colorimetric assay, or a fluorescence assay.

[0248] In some embodiments, the composition reduces the MSP measurement relative to the baseline MSP measurement. In some embodiments, the composition reduces circulating MSP levels relative to the baseline MSP measurement. In some embodiments, the composition reduces tissue MSP levels relative to the baseline MSP measurement. In some embodiments, the reduced MSP levels are measured in a second sample obtained from the subject after administering the composition to the subject. In some embodiments, the second sample is a blood, serum, plasma, liver, or lung sample. In some embodiments, the MSP measurement is decreased by about 2.5% or more, about 5% or more, or about 7.5% or more, relative to the baseline MSP measurement. In some embodiments, the MSP measurement is decreased by about 10% or more, relative to the baseline MSP measurement. In some embodiments, the MSP measurement is decreased by about 20% or more, about 30% or more, about 40% or more, about 50% or more, about 60% or more, about 70% or more, about 80% or more, about 90% or more, or about 100%, relative to the baseline MSP measurement. In some embodiments, the MSP measurement is decreased by no more than about 2.5%, no more than about 5%, or no more than about 7.5%, relative to the baseline MSP measurement. In some embodiments, the MSP measurement is decreased by no more than about 10%, relative to the baseline MSP measurement. In some embodiments, the MSP measurement is decreased by no more than about 20%, no more than about 30%, no more than about 40%, no more than about 50%, no more than about 60%, no more than about 70%, no more than about 80%, no more than about 90%, or no more than about 100% relative to the baseline MSP measurement. In some embodiments, the MSP measurement is decreased by 2.5%, 5%, 7.5%, 19%, 20%, 30%, 40%, 50%, 60%, 70%, 80%, 90%, or 100%, or by a range defined by any of the two aforementioned percentages.

[0249] In some embodiments, the measurement is an MST1 mRNA measurement. In some embodiments, the MST1 mRNA measurement comprises an MST1 mRNA level. In some embodiments, the MST1 mRNA level is indicated as an amount or percentage of MST1 mRNA per sample weight. In some embodiments, the MST1 mRNA level is indicated as an amount or percentage of MST1 mRNA per sample volume. In some embodiments, the MST1 mRNA level is indicated as an amount or percentage of MST1 mRNA per total mRNA within the sample. In some embodiments, the MST1 mRNA level is indicated as an amount or percentage of MST1 mRNA per total nucleic acids within the sample. In some embodiments, the MST1 mRNA level is indicated relative to another mRNA level, such as an mRNA level of a housekeeping gene, within the sample. In some embodiments, the MST1 mRNA measurement is obtained by an assay such as a PCR assay. In some embodiments, the PCR comprises qPCR. In some embodiments, the PCR comprises reverse transcription of the MST1 mRNA.

[0250] In some embodiments, the composition reduces the MST1 mRNA measurement relative to the baseline MST1 mRNA measurement. In some embodiments, the MST1 mRNA measurement is obtained in a second sample obtained from the subject after administering the composition to the subject. In some embodiments, the composition reduces MST1 mRNA levels relative to the baseline MST1 mRNA levels. In some embodiments, the reduced MST1 mRNA levels are measured in a second sample obtained from the subject after administering the composition to the subject. In some embodiments, the second sample is a lung sample. In some embodiments, the second sample is a liver sample. In some embodiments, the MST1 mRNA measurement is reduced by about 2.5% or more, about 5% or more, or about 7.5% or more, relative to the baseline MST1 mRNA measurement. In some embodiments, the MST1 mRNA measurement is decreased by about 10% or more, relative to the baseline MST1 mRNA measurement. In some embodiments, the MST1 mRNA measurement is decreased by about 20% or more, about 30% or more, about 40% or more, about 50% or more, about 60% or more, about 70% or more, about 80% or more, about 90% or more, or about 100%, relative to the baseline MST1 mRNA measurement. In some embodiments, the MST1 mRNA measurement is decreased by no more than about 2.5%, no more than about 5%, or no more than about 7.5%, relative to the baseline MST1 mRNA measurement. In some embodiments, the MST1 mRNA measurement is decreased by no more than about 10%, relative to the baseline MST1 mRNA measurement. In some embodiments, the MST1 mRNA measurement is decreased by no more than about 20%, no more than about 30%, no more than about 40%, no more than about 50%, no more than about 60%, no more than about 70%, no more than about 80%, no more than about 90%, or no more than about 100%, relative to the baseline MST1 mRNA measurement. In some embodiments, the MST1 mRNA measurement is decreased by 2.5%, 5%, 7.5%, 10%, 20%, 30%, 40%, 50%, 60%, 70%, 80%, 90%, or 100% or by a range defined by any of the two aforementioned percentages.

### III. DEFINITIONS

[0251] Unless defined otherwise, all terms of art, notations and other technical and scientific terms or terminology used herein are intended to have the same meaning as is commonly understood by one of ordinary skill in the art to which the claimed subject matter pertains. In some cases, terms with commonly understood meanings are defined herein for clarity and/or for ready reference, and the inclusion of such definitions herein should not necessarily be construed to represent a substantial difference over what is generally understood in the art.

[0252] Throughout this application, various embodiments may be presented in a range format. It should be understood that the description in range format is merely for convenience and brevity and should not be construed as an inflexible limitation on the scope of the disclosure. Accordingly, the description of a range should be considered to have specifically disclosed all the possible subranges as well as individual numerical values within that range. For example, description of a range such as from 1 to 6 should be considered to have specifically disclosed subranges such as from 1 to 3, from 1 to 4, from 1 to 5, from 2 to 4, from 2 to 6, from 3 to 6 etc., as well as individual numbers within that range, for example, 1, 2, 3, 4, 5, and 6. This applies regardless of the breadth of the range.

[0253] As used in the specification and claims, the singular forms “a”, “an” and “the” include plural references unless the context clearly dictates otherwise. For example, the term “a sample” includes a plurality of samples, including mixtures thereof.

[0254] The terms “determining,” “measuring,” “evaluating,” “assessing,” “assaying,” and “analyzing” are often used interchangeably herein to refer to forms of measurement. The terms include determining if an element is present or not (for example, detection). These terms can include quantitative, qualitative or quantitative and qualitative determinations. Assessing can be relative or absolute. “Detecting the presence of” can include determining the amount of something present in addition to determining whether it is present or absent depending on the context.

[0255] The terms “subject,” and “patient” may be used interchangeably herein. A “subject” can be a biological entity containing expressed genetic materials. The biological entity can be a plant, animal, or microorganism, including, for example, bacteria, viruses, fungi, and protozoa. The subject can be a mammal. The mammal can be a human. The subject may be diagnosed or suspected of being at high risk for a disease. In some cases, the subject is not necessarily diagnosed or suspected of being at high risk for the disease.

[0256] As used herein, the term “about” a number refers to that number plus or minus 10% of that number. The term “about” a range refers to that range minus 10% of its lowest value and plus 10% of its greatest value.

[0257] As used herein, the terms “treatment” or “treating” are used in reference to a pharmaceutical or other intervention regimen for obtaining beneficial or desired results in the recipient. Beneficial or desired results include but are not limited to a therapeutic benefit and/or a prophylactic benefit. A therapeutic benefit may refer to eradication or amelioration of symptoms or of an underlying disorder being treated. Also, a therapeutic benefit can be achieved with the eradication or amelioration of one or more of the physiological symptoms associated with the underlying disorder such that an improvement is observed in the subject, notwithstanding that the subject may still be afflicted with the underlying disorder. A prophylactic effect includes delaying, preventing, or eliminating the appearance of a disease or condition, delaying or eliminating the onset of symptoms of a disease or condition, slowing, halting, or reversing the progression of a disease or condition, or any combination thereof. For prophylactic benefit, a subject at risk of developing a particular disease, or to a subject reporting one or more of the physiological symptoms of a disease may undergo treatment, even though a diagnosis of this disease may not have been made.

[0258] Some embodiments refer to nucleic acid sequence information. It is contemplated that in some embodiments, thymine (T) may be interchanged with uracil (U), or vice versa. For example, some sequences in the sequence listing may recite Ts, but these may be replaced with Us in some embodiments. In some oligonucleotides with nucleic acid sequences that include uracil, the uracil may be replaced with thymine. Similarly, in some oligonucleotides with nucleic acid sequences that include thymine, the thymine may be replaced with uracil. In some embodiments, an oligonucleotide such as an siRNA comprises or consists of RNA. In some embodiments, the oligonucleotide may comprise or consist of DNA. For example, an ASO may include DNA.

[0259] The section headings used herein are for organizational purposes only and are not to be construed as limiting the subject matter described.

### VI. EXAMPLES

### Example 1: Variants in MST1 Demonstrate Protective Associations for Obstructive Lung Diseases and Related Traits

[0260] Variants in MST1 were evaluated for associations with lung diseases and related pulmonary and leukocyte traits in approximately 382,000 individuals with genotype data from the UK Biobank cohort. Variants evaluated included: (1) rs142690032, a low-frequency (AAF=0.02) MST1 stop-gained variant (Arg651Ter; R651Ter) which prematurely terminates the MST1 protein at amino acid 651, (2) rs3197999, a common (AAF=0.29) MST1 missense variant (Arg703Cys; R703C) which has been experimentally characterized as a MST1 hypomorph variant and is also a MST1∇pQTL, and (3) rs3020779, a common (AAF=0.82) MST1 synonymous variant (Pro153Pro; P153P) which is a liver and lung MST1 sQTL and a lung∇eQTL for MST1R, the gene encoding MSP's receptor. All three variants were considered hypomorphic or loss-of-function variants that resulted in a decrease in the abundance or activity of the MST1 gene product.

[0261] Analyses used a logistic or linear regression model with age, sex and the first ten principal components of genetic ancestry as covariates. The analyses resulted in identification of associations for the individual MST1 variants (Table 2A, 2B, 2C, and 2D). For example, there were protective associations with multiple lung-disease-related traits. The evaluated variants were associated with protection from COPD, asthma and lower risk of inhaled beta agonist prescription (Table 2A and 2B). Additionally, the evaluated variants were associated with increased lung function (FEV1 and FVC) and decreased circulating neutrophil counts (Table 2C and 2D).

TABLE 2A
MST1 lung disease associations

| | | | | COPD | |
|---|---|---|---|---|---|
| | | | | (n = 22,308) | |
| Variant | Gene | Function | AAF | P value | OR |
| rs142690032 | MST1 | Stop-Gained; | 0.02 | 4.07E−07 | ↓0.859 |
| | | R651Ter | | | |
| rs3197999 | MST1 | Missense; R703C; | 0.29 | 2.16E−05 | ↓0.962 |
| | | MST1 pQTL | | | |
| rs3020779 | MST1 | Synonymous; P153P; | 0.82 | 4.33E−09 | ↓0.941 |
| | | MST1 sQTL; MST1R eQTL | | | |

TABLE 2B
MST1 lung disease associations

| | Asthma | | Family History of | | Inhaled Beta Agonist | |
|---|---|---|---|---|---|---|
| | (n = 58,257) | | COPD (n = 60,301) | | Medication (n = 31,028) | |
| Variant | P value | OR | P value | OR | P value | OR |
| rs142690032 | 0.004 | ↓0.955 | 0.105 | ↓0.980 | 4.47E−04 | ↓0.931 |
| rs3197999 | 0.002 | ↓0.983 | 0.001 | ↓0.984 | 2.56E−06 | ↓0.968 |
| rs3020779 | 4.57E−04 | ↓0.979 | 0.004 | ↓0.985 | 5.32E−05 | ↓0.969 |

TABLE 2C
MST1 lung function and neutrophil associations

| | | | | FEV1 | |
|---|---|---|---|---|---|
| | | | | (n = 287,050) | |
| Variant | Gene | Function | AAF | P value | Beta |
| rs142690032 | MST1 | Stop-Gained; | 0.02 | 0.003 | ↑0.015 |
| | | R651Ter | | | |
| rs3197999 | MST1 | Missense; R703C; | 0.29 | 3.29E−15 | ↑0.002 |
| | | MST1 pQTL | | | |
| rs3020779 | MST1 | Synonymous; P153P; | 0.82 | 3.06E−10 | ↑0.002 |
| | | MST1 sQTL; MST1R eQTL | | | |

TABLE 2D
MST1 lung function and neutrophil associations

| | FVC | | FEV1/FVC Ratio | | Neutrophil Count | |
|---|---|---|---|---|---|---|
| | (n = 286,925) | | (n = 286,523) | | (n = 366,089) | |
| Variant | P value | Beta | P value | Beta | P value | Beta |
| rs142690032 | 0.002 | ↑0.003 | 0.789 | ↑−0.003 | 0.005 | ↓−0.034 |
| rs3197999 | 1.03E−11 | ↑0.002 | 0.004 | ↑0.008 | 8.2E−08 | ↓−0.018 |
| rs3020779 | 2.41E−06 | ↑0.001 | 9.32E−09 | ↑0.019 | 0.01 | ↓−0.010 |

[0262] These results indicate that loss-of-function of MST1 results in protection from COPD and asthma, improved lung function and lower circulating neutrophils, which are an important pro-inflammatory cell type in obstructive airways disease. These results further indicate that therapeutic inhibition of MST1 may result in similar disease-protective effects.

### Protective Variants in MST1 Result in Loss of MST1 Protein

[0263] Pre-mRNA expression constructs encoding for wild type and R651Ter (Arg651Ter; rs142690032) proteins were generated. The pre-mRNA of the protein coding transcript (ENST00000449682) of MST1, containing the exons, introns, and 5′ and 3′ UTRs, was cloned into a pcDNA3. 1(+) vector driven by a CMV promoter. Empty vector was used as control. For R651Ter expression constructs, the A allele replaced the G allele at DNA sequence position chr3:49684379 (human genome build 38). This created an R651Ter premature stop codon.

[0264] Transfections of Huh7 cells were optimized. Huh7 cells were plated in a T75 flask in complete growth media and grown for 48 hours followed by a media change. Cells were then transfected with 15 μg of plasmid DNA and 45 μl of TransIT-2020. Cells were incubated for 48 hours, and then harvested.

[0265] Cell lysates from transfected cells were assayed to evaluate intracellular MST1 protein by western blot (FIG. 1). In empty vector transfected Huh7 cells, MST1 was not detectable by western blot. In cells transfected with the wild type construct, MST1 was detected by western blot as a band around 80 kDa. In cells transfected with the R651Ter construct, MST1 was substantially reduced by western blot compared with wild type, suggesting the premature stop codon results in loss of MST1 via nonsense mediated decay or degradation at the protein level.

[0266] These data provide experimental verification that MST1 gene variants associated with protection from COPD and asthma, improved lung function and lower circulating neutrophils, result in loss of MST1 protein abundance or function. Accordingly, in some cases therapeutic inhibition or modulation of MST1 may be an effective genetically-informed method of treatment for these diseases and measures.

### Example 2: Bioinformatic Selection of Sequences in Order to Identify Therapeutic siRNAs to Downmodulate Expression of the MST1 mRNA

[0267] Screening sets were defined based on bioinformatic analysis. Therapeutic siRNAs were designed to target human MST1, and the MST1 sequence of at least one toxicology-relevant species, in this case, the non-human primates (NHP) rhesus and cynomolgus monkeys. Drivers for the design of the screening set were predicted specificity of the siRNAs against the transcriptome of the relevant species as well as cross-reactivity between species. Predicted specificity in human, rhesus monkey, cynomolgus monkey, mouse and rat was determined for sense (S) and antisense (AS) strands. These were assigned a “specificity score” which considered a likelihood of unintended downregulation of any other transcript by full or partial complementarity of an siRNA strand (up to 4 mismatches within positions 2-18) as well as the number and positions of mismatches. Thus, off-target(s) for antisense and sense strands of each siRNA were identified. In addition, the number of potential off-targets was used as an additional specificity factor in the specificity score. As identified, siRNAs with high specificity and a low number of predicted off-targets provide a benefit of increased targeting specificity.

[0268] In addition to selecting siRNA sequences with high sequence specificity to MST1 mRNA, siRNA sequences within the seed region were analyzed for similarity to seed regions of known miRNAs. siRNAs can function in a miRNA like manner via base-pairing with complementary sequences within the 3′-UTR of mRNA molecules. The complementarity typically encompasses the 5′-bases at positions 2-7 of the miRNA (seed region). To circumvent siRNAs to act via functional miRNA binding sites, siRNA strands containing natural miRNA seed regions were avoided. Seed regions identified in miRNAs from human, mouse, rat, rhesus monkey, dog, rabbit and pig are referred to as “conserved”. Combining the “specificity score” with miRNA seed analysis yielded a “specificity category”. This is divided into categories 1-4, with 1 having the highest specificity and 4 having the lowest specificity. Each strand of the siRNA is assigned to a specificity category.

[0269] Specificity and species cross-reactivity was assessed for human, cynomolgus monkey, rhesus monkey, mouse and rat MST1. The analysis was based on a canonical siRNA design using 19 bases and 17 bases (without considering positions 1 and 19) for cross-reactivity. Full match as well as single mismatch analyses were included.

[0270] Analysis of the human Single Nucleotide Polymorphism (SNP) database (NCBI-DB-SNP) to identify siRNAs targeting regions with known SNPs was also carried out to identify siRNAs that may be non-functional in individuals containing the SNP. Information regarding the positions of SNPs within the target sequence as well as minor allele frequency (MAF) in case data was obtained in this analysis.

[0271] Initial analysis of relevant MST1 mRNA sequence revealed few sequences that fulfil the specificity parameters and at the same time target MST1 mRNA in all of the analyzed relevant species. Therefore, it was decided to design independent screening subsets for the therapeutic siRNAs.

[0272] The siRNAs in these subsets recognize the human, cynomolgus monkey, rhesus monkey MST1 sequences. Therefore, the siRNAs in these subsets can be used to target human MST1 in a therapeutic setting.

[0273] The number of siRNA sequences that can be derived from human MST1 mRNA (NM_020998.4 SEQ ID NO: 6185) without consideration of specificity or species cross-reactivity was 3024 (sense and antisense strand sequences included in SEQ ID NOS: 1-6048).

[0274] Prioritizing sequences for target specificity, species cross-reactivity, miRNA seed region sequences and SNPs as described above yields subset A. Subset A contains 231 siRNAs whose base sequences are shown in Table 3.

TABLE 3
Sequences in siRNA subset A

| SEQ | sense strand | SEQ | antisense strand |
|---|---|---|---|
| ID | sequence | ID | sequence |
| NO: | (5′-3′) | NO: | (5′-3′) |
| 424 | AGCUGGGGCAAGUAAUUUU | 3448 | AAAAUUACUUGCCCCAGCU |
| 474 | AAAAGUUUAAUGUCACCCA | 3498 | UGGGUGACAUUAAACUUUU |
| 480 | UUAAUGUCACCCAGGGGCU | 3504 | AGCCCCUGGGUGACAUUAA |
| 481 | UAAUGUCACCCAGGGGCUG | 3505 | CAGCCCCUGGGUGACAUUA |
| 587 | UCAAGUGUCCCCACCAAAC | 3611 | GUUUGGUGGGGACACUUGA |
| 596 | CCCACCAAACCUUCCUAAC | 3620 | GUUAGGAAGGUUUGGUGGG |
| 597 | CCACCAAACCUUCCUAACA | 3621 | UGUUAGGAAGGUUUGGUGG |
| 598 | CACCAAACCUUCCUAACAC | 3622 | GUGUUAGGAAGGUUUGGUG |
| 603 | AACCUUCCUAACACCUGUC | 3627 | GACAGGUGUUAGGAAGGUU |
| 608 | UCCUAACACCUGUCCACUA | 3632 | UAGUGGACAGGUGUUAGGA |
| 638 | GCCCUUGCAACUGACCUAU | 3662 | AUAGGUCAGUUGCAAGGGC |
| 639 | CCCUUGCAACUGACCUAUG | 3663 | CAUAGGUCAGUUGCAAGGG |
| 642 | UUGCAACUGACCUAUGGGA | 3666 | UCCCAUAGGUCAGUUGCAA |
| 643 | UGCAACUGACCUAUGGGAC | 3667 | GUCCCAUAGGUCAGUUGCA |
| 644 | GCAACUGACCUAUGGGACC | 3668 | GGUCCCAUAGGUCAGUUGC |
| 646 | AACUGACCUAUGGGACCUG | 3670 | CAGGUCCCAUAGGUCAGUU |
| 647 | ACUGACCUAUGGGACCUGA | 3671 | UCAGGUCCCAUAGGUCAGU |
| 741 | AGAGCCACCCAAUCCCGUA | 3765 | UACGGGAUUGGGUGGCUCU |
| 742 | GAGCCACCCAAUCCCGUAG | 3766 | CUACGGGAUUGGGUGGCUC |
| 743 | AGCCACCCAAUCCCGUAGG | 3767 | CCUACGGGAUUGGGUGGCU |
| 745 | CCACCCAAUCCCGUAGGGA | 3769 | UCCCUACGGGAUUGGGUGG |
| 746 | CACCCAAUCCCGUAGGGAC | 3770 | GUCCCUACGGGAUUGGGUG |
| 747 | ACCCAAUCCCGUAGGGACA | 3771 | UGUCCCUACGGGAUUGGGU |
| 748 | CCCAAUCCCGUAGGGACAG | 3772 | CUGUCCCUACGGGAUUGGG |
| 749 | CCAAUCCCGUAGGGACAGG | 3773 | CCUGUCCCUACGGGAUUGG |
| 750 | CAAUCCCGUAGGGACAGGU | 3774 | ACCUGUCCCUACGGGAUUG |
| 751 | AAUCCCGUAGGGACAGGUU | 3775 | AACCUGUCCCUACGGGAUU |
| 753 | UCCCGUAGGGACAGGUUUC | 3777 | GAAACCUGUCCCUACGGGA |
| 792 | GUGGUGGGUCACAGUGCAG | 3816 | CUGCACUGUGACCCACCAC |
| 859 | CAAUGCUUAGGGGUCCCUG | 3883 | CAGGGACCCCUAAGCAUUG |
| 1041 | CGUGAGCAGCCAUGGUUGC | 4065 | GCAACCAUGGCUGCUCACG |
| 1042 | GUGAGCAGCCAUGGUUGCC | 4066 | GGCAACCAUGGCUGCUCAC |
| 1048 | AGCCAUGGUUGCCAACUGC | 4072 | GCAGUUGGCAACCAUGGCU |
| 1050 | CCAUGGUUGCCAACUGCUG | 4074 | CAGCAGUUGGCAACCAUGG |
| 1068 | GCCAUGGACUCAACACUCG | 4092 | CGAGUGUUGAGUCCAUGGC |
| 1070 | CAUGGACUCAACACUCGCC | 4094 | GGCGAGUGUUGAGUCCAUG |
| 1071 | AUGGACUCAACACUCGCCC | 4095 | GGGCGAGUGUUGAGUCCAU |
| 1072 | UGGACUCAACACUCGCCCC | 4096 | GGGGCGAGUGUUGAGUCCA |
| 1073 | GGACUCAACACUCGCCCCA | 4097 | UGGGGCGAGUGUUGAGUCC |
| 1074 | GACUCAACACUCGCCCCAC | 4098 | GUGGGGCGAGUGUUGAGUC |
| 1077 | UCAACACUCGCCCCACACG | 4101 | CGUGUGGGGCGAGUGUUGA |
| 1079 | AACACUCGCCCCACACGAG | 4103 | CUCGUGUGGGGCGAGUGUU |
| 1081 | CACUCGCCCCACACGAGGC | 4105 | GCCUCGUGUGGGGCGAGUG |
| 1082 | ACUCGCCCCACACGAGGCU | 4106 | AGCCUCGUGUGGGGCGAGU |
| 1083 | CUCGCCCCACACGAGGCUG | 4107 | CAGCCUCGUGUGGGGCGAG |
| 1086 | GCCCCACACGAGGCUGCGG | 4110 | CCGCAGCCUCGUGUGGGGC |
| 1087 | CCCCACACGAGGCUGCGGC | 4111 | GCCGCAGCCUCGUGUGGGG |
| 1110 | UGGGCGCUGUGACCUCUUC | 4134 | GAAGAGGUCACAGCGCCCA |
| 1162 | AACAAUGGGGUUGGGUACC | 4186 | GGUACCCAACCCCAUUGUU |
| 1163 | ACAAUGGGGUUGGGUACCG | 4187 | CGGUACCCAACCCCAUUGU |
| 1164 | CAAUGGGGUUGGGUACCGG | 4188 | CCGGUACCCAACCCCAUUG |
| 1170 | GGUUGGGUACCGGGGCACC | 4194 | GGUGCCCCGGUACCCAACC |
| 1220 | AGGCUUGGAGCCACAAGUU | 4244 | AACUUGUGGCUCCAAGCCU |
| 1221 | GGCUUGGAGCCACAAGUUC | 4245 | GAACUUGUGGCUCCAAGCC |
| 1266 | UCUCCGGAAUGGCCUGGAA | 4290 | UUCCAGGCCAUUCCGGAGA |
| 1298 | GUAACCCUGAUGGCGACCC | 4322 | GGGUCGCCAUCAGGGUUAC |
| 1309 | GGCGACCCCGGAGGUCCUU | 4333 | AAGGACCUCCGGGGUCGCC |
| 1311 | CGACCCCGGAGGUCCUUGG | 4335 | CCAAGGACCUCCGGGGUCG |
| 1312 | GACCCCGGAGGUCCUUGGU | 4336 | ACCAAGGACCUCCGGGGUC |
| 1313 | ACCCCGGAGGUCCUUGGUG | 4337 | CACCAAGGACCUCCGGGGU |
| 1314 | CCCCGGAGGUCCUUGGUGC | 4338 | GCACCAAGGACCUCCGGGG |
| 1353 | GCGCUUCCAGAGCUGCGGC | 4377 | GCCGCAGCUCUGGAAGCGC |
| 1364 | GCUGCGGCAUCAAAUCCUG | 4388 | CAGGAUUUGAUGCCGCAGC |
| 1365 | CUGCGGCAUCAAAUCCUGC | 4389 | GCAGGAUUUGAUGCCGCAG |
| 1366 | UGCGGCAUCAAAUCCUGCC | 4390 | GGCAGGAUUUGAUGCCGCA |
| 1367 | GCGGCAUCAAAUCCUGCCG | 4391 | CGGCAGGAUUUGAUGCCGC |
| 1368 | CGGCAUCAAAUCCUGCCGG | 4392 | CCGGCAGGAUUUGAUGCCG |
| 1369 | GGCAUCAAAUCCUGCCGGG | 4393 | CCCGGCAGGAUUUGAUGCC |
| 1370 | GCAUCAAAUCCUGCCGGGA | 4394 | UCCCGGCAGGAUUUGAUGC |
| 1371 | CAUCAAAUCCUGCCGGGAG | 4395 | CUCCCGGCAGGAUUUGAUG |
| 1373 | UCAAAUCCUGCCGGGAGGC | 4397 | GCCUCCCGGCAGGAUUUGA |
| 1375 | AAAUCCUGCCGGGAGGCCG | 4399 | CGGCCUCCCGGCAGGAUUU |
| 1376 | AAUCCUGCCGGGAGGCCGC | 4400 | GCGGCCUCCCGGCAGGAUU |
| 1381 | UGCCGGGAGGCCGCGUGUG | 4405 | CACACGCGGCCUCCCGGCA |
| 1440 | CACGGAGUCAGGGCGCGAG | 4464 | CUCGCGCCCUGACUCCGUG |
| 1454 | GCGAGUGCCAGCGCUGGGA | 4478 | UCCCAGCGCUGGCACUCGC |
| 1490 | AGCACCCCUUCGAGCCGGG | 4514 | CCCGGCUCGAAGGGGUGCU |
| 1530 | GGACGACAACUAUUGCCGG | 4554 | CCGGCAAUAGUUGUCGUCC |
| 1531 | GACGACAACUAUUGCCGGA | 4555 | UCCGGCAAUAGUUGUCGUC |
| 1532 | ACGACAACUAUUGCCGGAA | 4556 | UUCCGGCAAUAGUUGUCGU |
| 1533 | CGACAACUAUUGCCGGAAU | 4557 | AUUCCGGCAAUAGUUGUCG |
| 1534 | GACAACUAUUGCCGGAAUC | 4558 | GAUUCCGGCAAUAGUUGUC |
| 1538 | ACUAUUGCCGGAAUCCUGA | 4562 | UCAGGAUUCCGGCAAUAGU |
| 1543 | UGCCGGAAUCCUGACGGCU | 4567 | AGCCGUCAGGAUUCCGGCA |
| 1544 | GCCGGAAUCCUGACGGCUC | 4568 | GAGCCGUCAGGAUUCCGGC |
| 1545 | CCGGAAUCCUGACGGCUCC | 4569 | GGAGCCGUCAGGAUUCCGG |
| 1577 | GCUACACUACGGAUCCGCA | 4601 | UGCGGAUCCGUAGUGUAGC |
| 1578 | CUACACUACGGAUCCGCAG | 4602 | CUGCGGAUCCGUAGUGUAG |
| 1579 | UACACUACGGAUCCGCAGA | 4603 | UCUGCGGAUCCGUAGUGUA |
| 1597 | AUCGAGCGAGAGUUCUGUG | 4621 | CACAGAACUCUCGCUCGAU |
| 1598 | UCGAGCGAGAGUUCUGUGA | 4622 | UCACAGAACUCUCGCUCGA |
| 1600 | GAGCGAGAGUUCUGUGACC | 4624 | GGUCACAGAACUCUCGCUC |
| 1601 | AGCGAGAGUUCUGUGACCU | 4625 | AGGUCACAGAACUCUCGCU |
| 1946 | CAGGGGAGCAGUACCGCGG | 4970 | CCGCGGUACUGCUCCCCUG |
| 1947 | AGGGGAGCAGUACCGCGGC | 4971 | GCCGCGGUACUGCUCCCCU |
| 1948 | GGGGAGCAGUACCGCGGCA | 4972 | UGCCGCGGUACUGCUCCCC |
| 1950 | GGAGCAGUACCGCGGCACG | 4974 | CGUGCCGCGGUACUGCUCC |
| 1951 | GAGCAGUACCGCGGCACGG | 4975 | CCGUGCCGCGGUACUGCUC |
| 1953 | GCAGUACCGCGGCACGGUC | 4977 | GACCGUGCCGCGGUACUGC |
| 1954 | CAGUACCGCGGCACGGUCA | 4978 | UGACCGUGCCGCGGUACUG |
| 1955 | AGUACCGCGGCACGGUCAG | 4979 | CUGACCGUGCCGCGGUACU |
| 1956 | GUACCGCGGCACGGUCAGC | 4980 | GCUGACCGUGCCGCGGUAC |
| 1957 | UACCGCGGCACGGUCAGCA | 4981 | UGCUGACCGUGCCGCGGUA |
| 1959 | CCGCGGCACGGUCAGCAAG | 4983 | CUUGCUGACCGUGCCGCGG |
| 1960 | CGCGGCACGGUCAGCAAGA | 4984 | UCUUGCUGACCGUGCCGCG |
| 1961 | GCGGCACGGUCAGCAAGAC | 4985 | GUCUUGCUGACCGUGCCGC |
| 1963 | GGCACGGUCAGCAAGACCC | 4987 | GGGUCUUGCUGACCGUGCC |
| 1965 | CACGGUCAGCAAGACCCGC | 4989 | GCGGGUCUUGCUGACCGUG |
| 1968 | GGUCAGCAAGACCCGCAAG | 4992 | CUUGCGGGUCUUGCUGACC |
| 1971 | CAGCAAGACCCGCAAGGGU | 4995 | ACCCUUGCGGGUCUUGCUG |
| 1972 | AGCAAGACCCGCAAGGGUG | 4996 | CACCCUUGCGGGUCUUGCU |
| 1974 | CAAGACCCGCAAGGGUGUC | 4998 | GACACCCUUGCGGGUCUUG |
| 1975 | AAGACCCGCAAGGGUGUCC | 4999 | GGACACCCUUGCGGGUCUU |
| 1976 | AGACCCGCAAGGGUGUCCA | 5000 | UGGACACCCUUGCGGGUCU |
| 1977 | GACCCGCAAGGGUGUCCAG | 5001 | CUGGACACCCUUGCGGGUC |
| 1979 | CCCGCAAGGGUGUCCAGUG | 5003 | CACUGGACACCCUUGCGGG |
| 1980 | CCGCAAGGGUGUCCAGUGC | 5004 | GCACUGGACACCCUUGCGG |
| 1995 | GUGCCAGCGCUGGUCCGCU | 5019 | AGCGGACCAGCGCUGGCAC |
| 1997 | GCCAGCGCUGGUCCGCUGA | 5021 | UCAGCGGACCAGCGCUGGC |
| 1998 | CCAGCGCUGGUCCGCUGAG | 5022 | CUCAGCGGACCAGCGCUGG |
| 2000 | AGCGCUGGUCCGCUGAGAC | 5024 | GUCUCAGCGGACCAGCGCU |
| 2001 | GCGCUGGUCCGCUGAGACG | 5025 | CGUCUCAGCGGACCAGCGC |
| 2019 | GCCGCACAAGCCGCAGUUC | 5043 | GAACUGCGGCUUGUGCGGC |
| 2020 | CCGCACAAGCCGCAGUUCA | 5044 | UGAACUGCGGCUUGUGCGG |
| 2022 | GCACAAGCCGCAGUUCACG | 5046 | CGUGAACUGCGGCUUGUGC |
| 2023 | CACAAGCCGCAGUUCACGU | 5047 | ACGUGAACUGCGGCUUGUG |
| 2024 | ACAAGCCGCAGUUCACGUU | 5048 | AACGUGAACUGCGGCUUGU |
| 2025 | CAAGCCGCAGUUCACGUUU | 5049 | AAACGUGAACUGCGGCUUG |
| 2026 | AAGCCGCAGUUCACGUUUA | 5050 | UAAACGUGAACUGCGGCUU |
| 2027 | AGCCGCAGUUCACGUUUAC | 5051 | GUAAACGUGAACUGCGGCU |
| 2029 | CCGCAGUUCACGUUUACCU | 5053 | AGGUAAACGUGAACUGCGG |
| 2068 | GAGGAGAACUUCUGCCGGA | 5092 | UCCGGCAGAAGUUCUCCUC |
| 2082 | CCGGAACCCAGAUGGGGAU | 5106 | AUCCCCAUCUGGGUUCCGG |
| 2083 | CGGAACCCAGAUGGGGAUA | 5107 | UAUCCCCAUCUGGGUUCCG |
| 2084 | GGAACCCAGAUGGGGAUAG | 5108 | CUAUCCCCAUCUGGGUUCC |
| 2086 | AACCCAGAUGGGGAUAGCC | 5110 | GGCUAUCCCCAUCUGGGUU |
| 2087 | ACCCAGAUGGGGAUAGCCA | 5111 | UGGCUAUCCCCAUCUGGGU |
| 2090 | CAGAUGGGGAUAGCCAUGG | 5114 | CCAUGGCUAUCCCCAUCUG |
| 2091 | AGAUGGGGAUAGCCAUGGG | 5115 | CCCAUGGCUAUCCCCAUCU |
| 2094 | UGGGGAUAGCCAUGGGCCC | 5118 | GGGCCCAUGGCUAUCCCCA |
| 2099 | AUAGCCAUGGGCCCUGGUG | 5123 | CACCAGGGCCCAUGGCUAU |
| 2115 | GUGCUACACGAUGGACCCA | 5139 | UGGGUCCAUCGUGUAGCAC |
| 2139 | CCCAUUCGACUACUGUGCC | 5163 | GGCACAGUAGUCGAAUGGG |
| 2140 | CCAUUCGACUACUGUGCCC | 5164 | GGGCACAGUAGUCGAAUGG |
| 2141 | CAUUCGACUACUGUGCCCU | 5165 | AGGGCACAGUAGUCGAAUG |
| 2142 | AUUCGACUACUGUGCCCUG | 5166 | CAGGGCACAGUAGUCGAAU |
| 2145 | CGACUACUGUGCCCUGCGA | 5169 | UCGCAGGGCACAGUAGUCG |
| 2146 | GACUACUGUGCCCUGCGAC | 5170 | GUCGCAGGGCACAGUAGUC |
| 2148 | CUACUGUGCCCUGCGACGC | 5172 | GCGUCGCAGGGCACAGUAG |
| 2149 | UACUGUGCCCUGCGACGCU | 5173 | AGCGUCGCAGGGCACAGUA |
| 2151 | CUGUGCCCUGCGACGCUGC | 5175 | GCAGCGUCGCAGGGCACAG |
| 2155 | GCCCUGCGACGCUGCGCUG | 5179 | CAGCGCAGCGUCGCAGGGC |
| 2156 | CCCUGCGACGCUGCGCUGA | 5180 | UCAGCGCAGCGUCGCAGGG |
| 2157 | CCUGCGACGCUGCGCUGAU | 5181 | AUCAGCGCAGCGUCGCAGG |
| 2159 | UGCGACGCUGCGCUGAUGA | 5183 | UCAUCAGCGCAGCGUCGCA |
| 2160 | GCGACGCUGCGCUGAUGAC | 5184 | GUCAUCAGCGCAGCGUCGC |
| 2161 | CGACGCUGCGCUGAUGACC | 5185 | GGUCAUCAGCGCAGCGUCG |
| 2162 | GACGCUGCGCUGAUGACCA | 5186 | UGGUCAUCAGCGCAGCGUC |
| 2163 | ACGCUGCGCUGAUGACCAG | 5187 | CUGGUCAUCAGCGCAGCGU |
| 2167 | UGCGCUGAUGACCAGCCGC | 5191 | GCGGCUGGUCAUCAGCGCA |
| 2168 | GCGCUGAUGACCAGCCGCC | 5192 | GGCGGCUGGUCAUCAGCGC |
| 2172 | UGAUGACCAGCCGCCAUCA | 5196 | UGAUGGCGGCUGGUCAUCA |
| 2173 | GAUGACCAGCCGCCAUCAA | 5197 | UUGAUGGCGGCUGGUCAUC |
| 2175 | UGACCAGCCGCCAUCAAUC | 5199 | GAUUGAUGGCGGCUGGUCA |
| 2181 | GCCGCCAUCAAUCCUGGAC | 5205 | GUCCAGGAUUGAUGGCGGC |
| 2183 | CGCCAUCAAUCCUGGACCC | 5207 | GGGUCCAGGAUUGAUGGCG |
| 2225 | AGUGUGGCAAGAGGGUGGA | 5249 | UCCACCCUCUUGCCACACU |
| 2227 | UGUGGCAAGAGGGUGGAUC | 5251 | GAUCCACCCUCUUGCCACA |
| 2228 | GUGGCAAGAGGGUGGAUCG | 5252 | CGAUCCACCCUCUUGCCAC |
| 2288 | AUCCGGGCAACUCACCCUG | 5312 | CAGGGUGAGUUGCCCGGAU |
| 2289 | UCCGGGCAACUCACCCUGG | 5313 | CCAGGGUGAGUUGCCCGGA |
| 2307 | GACAGUCAGCUUGCGGAAU | 5331 | AUUCCGCAAGCUGACUGUC |
| 2308 | ACAGUCAGCUUGCGGAAUC | 5332 | GAUUCCGCAAGCUGACUGU |
| 2310 | AGUCAGCUUGCGGAAUCGG | 5334 | CCGAUUCCGCAAGCUGACU |
| 2369 | AGUGGAUACUGACUGCCCG | 5393 | CGGGCAGUCAGUAUCCACU |
| 2371 | UGGAUACUGACUGCCCGGC | 5395 | GCCGGGCAGUCAGUAUCCA |
| 2372 | GGAUACUGACUGCCCGGCA | 5396 | UGCCGGGCAGUCAGUAUCC |
| 2374 | AUACUGACUGCCCGGCAGU | 5398 | ACUGCCGGGCAGUCAGUAU |
| 2375 | UACUGACUGCCCGGCAGUG | 5399 | CACUGCCGGGCAGUCAGUA |
| 2378 | UGACUGCCCGGCAGUGCUU | 5402 | AAGCACUGCCGGGCAGUCA |
| 2382 | UGCCCGGCAGUGCUUCUCC | 5406 | GGAGAAGCACUGCCGGGCA |
| 2420 | CGGGCUAUGAGGUAUGGUU | 5444 | AACCAUACCUCAUAGCCCG |
| 2421 | GGGCUAUGAGGUAUGGUUG | 5445 | CAACCAUACCUCAUAGCCC |
| 2431 | GUAUGGUUGGGCACCCUGU | 5455 | ACAGGGUGCCCAACCAUAC |
| 2476 | AGCCUACAGCGGGUCCCAG | 5500 | CUGGGACCCGCUGUAGGCU |
| 2479 | CUACAGCGGGUCCCAGUAG | 5503 | CUACUGGGACCCGCUGUAG |
| 2480 | UACAGCGGGUCCCAGUAGC | 5504 | GCUACUGGGACCCGCUGUA |
| 2481 | ACAGCGGGUCCCAGUAGCC | 5505 | GGCUACUGGGACCCGCUGU |
| 2482 | CAGCGGGUCCCAGUAGCCA | 5506 | UGGCUACUGGGACCCGCUG |
| 2483 | AGCGGGUCCCAGUAGCCAA | 5507 | UUGGCUACUGGGACCCGCU |
| 2484 | GCGGGUCCCAGUAGCCAAG | 5508 | CUUGGCUACUGGGACCCGC |
| 2498 | CCAAGAUGGUGUGUGGGCC | 5522 | GGCCCACACACCAUCUUGG |
| 2499 | CAAGAUGGUGUGUGGGCCC | 5523 | GGGCCCACACACCAUCUUG |
| 2517 | CUCAGGCUCCCAGCUUGUC | 5541 | GACAAGCUGGGAGCCUGAG |
| 2527 | CAGCUUGUCCUGCUCAAGC | 5551 | GCUUGAGCAGGACAAGCUG |
| 2561 | CCCUGAACCAGCGUGUGGC | 5585 | GCCACACGCUGGUUCAGGG |
| 2562 | CCUGAACCAGCGUGUGGCC | 5586 | GGCCACACGCUGGUUCAGG |
| 2596 | CCUGAAUGGUAUGUGGUGC | 5620 | GCACCACAUACCAUUCAGG |
| 2628 | GUGUGAGAUUGCAGGCUGG | 5652 | CCAGCCUGCAAUCUCACAC |
| 2629 | UGUGAGAUUGCAGGCUGGG | 5653 | CCCAGCCUGCAAUCUCACA |
| 2645 | GGGGUGAGACCAAAGGUAC | 5669 | GUACCUUUGGUCUCACCCC |
| 2646 | GGGUGAGACCAAAGGUACG | 5670 | CGUACCUUUGGUCUCACCC |
| 2666 | GUAAUGACACAGUCCUAAA | 5690 | UUUAGGACUGUGUCAUUAC |
| 2667 | UAAUGACACAGUCCUAAAU | 5691 | AUUUAGGACUGUGUCAUUA |
| 2670 | UGACACAGUCCUAAAUGUG | 5694 | CACAUUUAGGACUGUGUCA |
| 2673 | CACAGUCCUAAAUGUGGCC | 5697 | GGCCACAUUUAGGACUGUG |
| 2675 | CAGUCCUAAAUGUGGCCUU | 5699 | AAGGCCACAUUUAGGACUG |
| 2676 | AGUCCUAAAUGUGGCCUUG | 5700 | CAAGGCCACAUUUAGGACU |
| 2707 | UCCAACCAGGAGUGUAACA | 5731 | UGUUACACUCCUGGUUGGA |
| 2709 | CAACCAGGAGUGUAACAUC | 5733 | GAUGUUACACUCCUGGUUG |
| 2710 | AACCAGGAGUGUAACAUCA | 5734 | UGAUGUUACACUCCUGGUU |
| 2712 | CCAGGAGUGUAACAUCAAG | 5736 | CUUGAUGUUACACUCCUGG |
| 2715 | GGAGUGUAACAUCAAGCAC | 5739 | GUGCUUGAUGUUACACUCC |
| 2716 | GAGUGUAACAUCAAGCACC | 5740 | GGUGCUUGAUGUUACACUC |
| 2718 | GUGUAACAUCAAGCACCGA | 5742 | UCGGUGCUUGAUGUUACAC |
| 2723 | ACAUCAAGCACCGAGGACG | 5747 | CGUCCUCGGUGCUUGAUGU |
| 2725 | AUCAAGCACCGAGGACGUG | 5749 | CACGUCCUCGGUGCUUGAU |
| 2811 | GGGCCCACUUGCCUGCUUU | 5835 | AAAGCAGGCAAGUGGGCCC |
| 2815 | CCACUUGCCUGCUUUACCC | 5839 | GGGUAAAGCAGGCAAGUGG |
| 2820 | UGCCUGCUUUACCCACAAC | 5844 | GUUGUGGGUAAAGCAGGCA |
| 2844 | GGUCCUGGAAGGAAUUAUA | 5868 | UAUAAUUCCUUCCAGGACC |
| 2857 | AUUAUAAUCCCCAACCGAG | 5881 | CUCGGUUGGGGAUUAUAAU |
| 2859 | UAUAAUCCCCAACCGAGUA | 5883 | UACUCGGUUGGGGAUUAUA |
| 2902 | GUCUUCACGCGUGUCUCUG | 5926 | CAGAGACACGCGUGAAGAC |
| 2903 | UCUUCACGCGUGUCUCUGU | 5927 | ACAGAGACACGCGUGAAGA |
| 2907 | CACGCGUGUCUCUGUGUUU | 5931 | AAACACAGAGACACGCGUG |
| 2998 | AACUUCUUGUCAGACAUAA | 6022 | UUAUGUCUGACAAGAAGUU |
| 2999 | ACUUCUUGUCAGACAUAAA | 6023 | UUUAUGUCUGACAAGAAGU |
| 3000 | CUUCUUGUCAGACAUAAAG | 6024 | CUUUAUGUCUGACAAGAAG |
| 3002 | UCUUGUCAGACAUAAAGCC | 6026 | GGCUUUAUGUCUGACAAGA |
| 3004 | UUGUCAGACAUAAAGCCAU | 6028 | AUGGCUUUAUGUCUGACAA |

[0275] The siRNAs in subset A have the following characteristics:
[0276] Cross-reactivity: With 19mer in human MST1 mRNA, with 17mer/19mer in NHP MST1
[0277] Specificity category: For human and NHP: AS2 or better, SS3 or better
[0278] miRNA seeds: AS+SS strand: seed region not conserved in human, mouse, and rat and not present in >4 species
[0279] Off-target frequency: ≤20 human off-targets matched with 2 mismatches in antisense strand
[0280] SNPs: siRNA target sites do not harbor SNPs with a MAF≥100 (pos. 2-18)

[0281] The siRNA sequences in subset A were selected for more stringent specificity to yield subset B. Subset B includes 197 siRNAs whose base sequences are shown in Table 4.

TABLE 4
Sequences in siRNA subset B

| SEQ | | SEQ | |
|---|---|---|---|
| ID | sense strand | ID | antisense strand |
| NO: | sequence (5′-3′) | NO: | sequence (5′-3′) |
| 474 | AAAAGUUUAAUGUCACCCA | 3498 | UGGGUGACAUUAAACUUUU |
| 480 | UUAAUGUCACCCAGGGGCU | 3504 | AGCCCCUGGGUGACAUUAA |
| 597 | CCACCAAACCUUCCUAACA | 3621 | UGUUAGGAAGGUUUGGUGG |
| 603 | AACCUUCCUAACACCUGUC | 3627 | GACAGGUGUUAGGAAGGUU |
| 608 | UCCUAACACCUGUCCACUA | 3632 | UAGUGGACAGGUGUUAGGA |
| 638 | GCCCUUGCAACUGACCUAU | 3662 | AUAGGUCAGUUGCAAGGGC |
| 639 | CCCUUGCAACUGACCUAUG | 3663 | CAUAGGUCAGUUGCAAGGG |
| 642 | UUGCAACUGACCUAUGGGA | 3666 | UCCCAUAGGUCAGUUGCAA |
| 643 | UGCAACUGACCUAUGGGAC | 3667 | GUCCCAUAGGUCAGUUGCA |
| 644 | GCAACUGACCUAUGGGACC | 3668 | GGUCCCAUAGGUCAGUUGC |
| 646 | AACUGACCUAUGGGACCUG | 3670 | CAGGUCCCAUAGGUCAGUU |
| 647 | ACUGACCUAUGGGACCUGA | 3671 | UCAGGUCCCAUAGGUCAGU |
| 741 | AGAGCCACCCAAUCCCGUA | 3765 | UACGGGAUUGGGUGGCUCU |
| 742 | GAGCCACCCAAUCCCGUAG | 3766 | CUACGGGAUUGGGUGGCUC |
| 743 | AGCCACCCAAUCCCGUAGG | 3767 | CCUACGGGAUUGGGUGGCU |
| 745 | CCACCCAAUCCCGUAGGGA | 3769 | UCCCUACGGGAUUGGGUGG |
| 746 | CACCCAAUCCCGUAGGGAC | 3770 | GUCCCUACGGGAUUGGGUG |
| 747 | ACCCAAUCCCGUAGGGACA | 3771 | UGUCCCUACGGGAUUGGGU |
| 748 | CCCAAUCCCGUAGGGACAG | 3772 | CUGUCCCUACGGGAUUGGG |
| 749 | CCAAUCCCGUAGGGACAGG | 3773 | CCUGUCCCUACGGGAUUGG |
| 750 | CAAUCCCGUAGGGACAGGU | 3774 | ACCUGUCCCUACGGGAUUG |
| 751 | AAUCCCGUAGGGACAGGUU | 3775 | AACCUGUCCCUACGGGAUU |
| 753 | UCCCGUAGGGACAGGUUUC | 3777 | GAAACCUGUCCCUACGGGA |
| 792 | GUGGUGGGUCACAGUGCAG | 3816 | CUGCACUGUGACCCACCAC |
| 859 | CAAUGCUUAGGGGUCCCUG | 3883 | CAGGGACCCCUAAGCAUUG |
| 1041 | CGUGAGCAGCCAUGGUUGC | 4065 | GCAACCAUGGCUGCUCACG |
| 1042 | GUGAGCAGCCAUGGUUGCC | 4066 | GGCAACCAUGGCUGCUCAC |
| 1050 | CCAUGGUUGCCAACUGCUG | 4074 | CAGCAGUUGGCAACCAUGG |
| 1070 | CAUGGACUCAACACUCGCC | 4094 | GGCGAGUGUUGAGUCCAUG |
| 1071 | AUGGACUCAACACUCGCCC | 4095 | GGGCGAGUGUUGAGUCCAU |
| 1072 | UGGACUCAACACUCGCCCC | 4096 | GGGGCGAGUGUUGAGUCCA |
| 1073 | GGACUCAACACUCGCCCCA | 4097 | UGGGGCGAGUGUUGAGUCC |
| 1074 | GACUCAACACUCGCCCCAC | 4098 | GUGGGGCGAGUGUUGAGUC |
| 1077 | UCAACACUCGCCCCACACG | 4101 | CGUGUGGGGCGAGUGUUGA |
| 1079 | AACACUCGCCCCACACGAG | 4103 | CUCGUGUGGGGCGAGUGUU |
| 1081 | CACUCGCCCCACACGAGGC | 4105 | GCCUCGUGUGGGGCGAGUG |
| 1082 | ACUCGCCCCACACGAGGCU | 4106 | AGCCUCGUGTGGGGCGAGU |
| 1083 | CUCGCCCCACACGAGGCUG | 4107 | CAGCCUCGUGUGGGGCGAG |
| 1162 | AACAAUGGGGUUGGGUACC | 4186 | GGUACCCAACCCCAUUGUU |
| 1163 | ACAAUGGGGUUGGGUACCG | 4187 | CGGUACCCAACCCCAUUGU |
| 1164 | CAAUGGGGUUGGGUACCGG | 4188 | CCGGUACCCAACCCCAUUG |
| 1170 | GGUUGGGUACCGGGGCACC | 4194 | GGUGCCCCGGUACCCAACC |
| 1220 | AGGCUUGGAGCCACAAGUU | 4244 | AACUUGUGGCUCCAAGCCU |
| 1298 | GUAACCCUGAUGGCGACCC | 4322 | GGGUCGCCAUCAGGGUUAC |
| 1309 | GGCGACCCCGGAGGUCCUU | 4333 | AAGGACCUCCGGGGUCGCC |
| 1311 | CGACCCCGGAGGUCCUUGG | 4335 | CCAAGGACCUCCGGGGUCG |
| 1312 | GACCCCGGAGGUCCUUGGU | 4336 | ACCAAGGACCUCCGGGGUC |
| 1313 | ACCCCGGAGGUCCUUGGUG | 4337 | CACCAAGGACCUCCGGGGU |
| 1314 | CCCCGGAGGUCCUUGGUGC | 4338 | GCACCAAGGACCUCCGGGG |
| 1364 | GCUGCGGCAUCAAAUCCUG | 4388 | CAGGAUUUGAUGCCGCAGC |
| 1365 | CUGCGGCAUCAAAUCCUGC | 4389 | GCAGGAUUUGAUGCCGCAG |
| 1366 | UGCGGCAUCAAAUCCUGCC | 4390 | GGCAGGAUUUGAUGCCGCA |
| 1367 | GCGGCAUCAAAUCCUGCCG | 4391 | CGGCAGGAUUUGAUGCCGC |
| 1368 | CGGCAUCAAAUCCUGCCGG | 4392 | CCGGCAGGAUUUGAUGCCG |
| 1369 | GGCAUCAAAUCCUGCCGGG | 4393 | CCCGGCAGGAUUUGAUGCC |
| 1370 | GCAUCAAAUCCUGCCGGGA | 4394 | UCCCGGCAGGAUUUGAUGC |
| 1371 | CAUCAAAUCCUGCCGGGAG | 4395 | CUCCCGGCAGGAUUUGAUG |
| 1373 | UCAAAUCCUGCCGGGAGGC | 4397 | GCCUCCCGGCAGGAUUUGA |
| 1375 | AAAUCCUGCCGGGAGGCCG | 4399 | CGGCCUCCCGGCAGGAUUU |
| 1376 | AAUCCUGCCGGGAGGCCGC | 4400 | GCGGCCUCCCGGCAGGAUU |
| 1440 | CACGGAGUCAGGGCGCGAG | 4464 | CUCGCGCCCUGACUCCGUG |
| 1490 | AGCACCCCUUCGAGCCGGG | 4514 | CCCGGCUCGAAGGGGUGCU |
| 1530 | GGACGACAACUAUUGCCGG | 4554 | CCGGCAAUAGUUGUCGUCC |
| 1531 | GACGACAACUAUUGCCGGA | 4555 | UCCGGCAAUAGUUGUCGUC |
| 1532 | ACGACAACUAUUGCCGGAA | 4556 | UUCCGGCAAUAGUUGUCGU |
| 1533 | CGACAACUAUUGCCGGAAU | 4557 | AUUCCGGCAAUAGUUGUCG |
| 1534 | GACAACUAUUGCCGGAAUC | 4558 | GAUUCCGGCAAUAGUUGUC |
| 1538 | ACUAUUGCCGGAAUCCUGA | 4562 | UCAGGAUUCCGGCAAUAGU |
| 1543 | UGCCGGAAUCCUGACGGCU | 4567 | AGCCGUCAGGAUUCCGGCA |
| 1544 | GCCGGAAUCCUGACGGCUC | 4568 | GAGCCGUCAGGAUUCCGGC |
| 1545 | CCGGAAUCCUGACGGCUCC | 4569 | GGAGCCGUCAGGAUUCCGG |
| 1577 | GCUACACUACGGAUCCGCA | 4601 | UGCGGAUCCGUAGUGUAGC |
| 1578 | CUACACUACGGAUCCGCAG | 4602 | CUGCGGAUCCGUAGUGUAG |
| 1579 | UACACUACGGAUCCGCAGA | 4603 | UCUGCGGAUCCGUAGUGUA |
| 1597 | AUCGAGCGAGAGUUCUGUG | 4621 | CACAGAACUCUCGCUCGAU |
| 1598 | UCGAGCGAGAGUUCUGUGA | 4622 | UCACAGAACUCUCGCUCGA |
| 1600 | GAGCGAGAGUUCUGUGACC | 4624 | GGUCACAGAACUCUCGCUC |
| 1601 | AGCGAGAGUUCUGUGACCU | 4625 | AGGUCACAGAACUCUCGCU |
| 1946 | CAGGGGAGCAGUACCGCGG | 4970 | CCGCGGUACUGCUCCCCUG |
| 1947 | AGGGGAGCAGUACCGCGGC | 4971 | GCCGCGGUACUGCUCCCCU |
| 1950 | GGAGCAGUACCGCGGCACG | 4974 | CGUGCCGCGGUACUGCUCC |
| 1951 | GAGCAGUACCGCGGCACGG | 4975 | CCGUGCCGCGGUACUGCUC |
| 1953 | GCAGUACCGCGGCACGGUC | 4977 | GACCGUGCCGCGGUACUGC |
| 1954 | CAGUACCGCGGCACGGUCA | 4978 | UGACCGUGCCGCGGUACUG |
| 1955 | AGUACCGCGGCACGGUCAG | 4979 | CUGACCGUGCCGCGGUACU |
| 1956 | GUACCGCGGCACGGUCAGC | 4980 | GCUGACCGUGCCGCGGUAC |
| 1957 | UACCGCGGCACGGUCAGCA | 4981 | UGCUGACCGUGCCGCGGUA |
| 1959 | CCGCGGCACGGUCAGCAAG | 4983 | CUUGCUGACCGUGCCGCGG |
| 1960 | CGCGGCACGGUCAGCAAGA | 4984 | UCUUGCUGACCGUGCCGCG |
| 1961 | GCGGCACGGUCAGCAAGAC | 4985 | GUCUUGCUGACCGUGCCGC |
| 1963 | GGCACGGUCAGCAAGACCC | 4987 | GGGUCUUGCUGACCGUGCC |
| 1965 | CACGGUCAGCAAGACCCGC | 4989 | GCGGGUCUUGCUGACCGUG |
| 1968 | GGUCAGCAAGACCCGCAAG | 4992 | CUUGCGGGUCUUGCUGACC |
| 1971 | CAGCAAGACCCGCAAGGGU | 4995 | ACCCUUGCGGGUCUUGCUG |
| 1972 | AGCAAGACCCGCAAGGGUG | 4996 | CACCCUUGCGGGUCUUGCU |
| 1974 | CAAGACCCGCAAGGGUGUC | 4998 | GACACCCUUGCGGGUCUUG |
| 1975 | AAGACCCGCAAGGGUGUCC | 4999 | GGACACCCUUGCGGGUCUU |
| 1976 | AGACCCGCAAGGGUGUCCA | 5000 | UGGACACCCUUGCGGGUCU |
| 1977 | GACCCGCAAGGGUGUCCAG | 5001 | CUGGACACCCUUGCGGGUC |
| 1979 | CCCGCAAGGGUGUCCAGUG | 5003 | CACUGGACACCCUUGCGGG |
| 1980 | CCGCAAGGGUGUCCAGUGC | 5004 | GCACUGGACACCCUUGCGG |
| 1995 | GUGCCAGCGCUGGUCCGCU | 5019 | AGCGGACCAGCGCUGGCAC |
| 1997 | GCCAGCGCUGGUCCGCUGA | 5021 | UCAGCGGACCAGCGCUGGC |
| 1998 | CCAGCGCUGGUCCGCUGAG | 5022 | CUCAGCGGACCAGCGCUGG |
| 2000 | AGCGCUGGUCCGCUGAGAC | 5024 | GUCUCAGCGGACCAGCGCU |
| 2001 | GCGCUGGUCCGCUGAGACG | 5025 | CGUCUCAGCGGACCAGCGC |
| 2019 | GCCGCACAAGCCGCAGUUC | 5043 | GAACUGCGGCUUGUGCGGC |
| 2020 | CCGCACAAGCCGCAGUUCA | 5044 | UGAACUGCGGCUUGUGCGG |
| 2022 | GCACAAGCCGCAGUUCACG | 5046 | CGUGAACUGCGGCUUGUGC |
| 2023 | CACAAGCCGCAGUUCACGU | 5047 | ACGUGAACUGCGGCUUGUG |
| 2024 | ACAAGCCGCAGUUCACGUU | 5048 | AACGUGAACUGCGGCUUGU |
| 2025 | CAAGCCGCAGUUCACGUUU | 5049 | AAACGUGAACUGCGGCUUG |
| 2026 | AAGCCGCAGUUCACGUUUA | 5050 | UAAACGUGAACUGCGGCUU |
| 2027 | AGCCGCAGUUCACGUUUAC | 5051 | GUAAACGUGAACUGCGGCU |
| 2029 | CCGCAGUUCACGUUUACCU | 5053 | AGGUAAACGUGAACUGCGG |
| 2083 | CGGAACCCAGAUGGGGAUA | 5107 | UAUCCCCAUCUGGGUUCCG |
| 2084 | GGAACCCAGAUGGGGAUAG | 5108 | CUAUCCCCAUCUGGGUUCC |
| 2086 | AACCCAGAUGGGGAUAGCC | 5110 | GGCUAUCCCCAUCUGGGUU |
| 2087 | ACCCAGAUGGGGAUAGCCA | 5111 | UGGCUAUCCCCAUCUGGGU |
| 2090 | CAGAUGGGGAUAGCCAUGG | 5114 | CCAUGGCUAUCCCCAUCUG |
| 2094 | UGGGGAUAGCCAUGGGCCC | 5118 | GGGCCCAUGGCUAUCCCCA |
| 2099 | AUAGCCAUGGGCCCUGGUG | 5123 | CACCAGGGCCCAUGGCUAU |
| 2115 | GUGCUACACGAUGGACCCA | 5139 | UGGGUCCAUCGUGUAGCAC |
| 2139 | CCCAUUCGACUACUGUGCC | 5163 | GGCACAGUAGUCGAAUGGG |
| 2140 | CCAUUCGACUACUGUGCCC | 5164 | GGGCACAGUAGUCGAAUGG |
| 2141 | CAUUCGACUACUGUGCCCU | 5165 | AGGGCACAGUAGUCGAAUG |
| 2142 | AUUCGACUACUGUGCCCUG | 5166 | CAGGGCACAGUAGUCGAAU |
| 2145 | CGACUACUGUGCCCUGCGA | 5169 | UCGCAGGGCACAGUAGUCG |
| 2146 | GACUACUGUGCCCUGCGAC | 5170 | GUCGCAGGGCACAGUAGUC |
| 2148 | CUACUGUGCCCUGCGACGC | 5172 | GCGUCGCAGGGCACAGUAG |
| 2149 | UACUGUGCCCUGCGACGCU | 5173 | AGCGUCGCAGGGCACAGUA |
| 2151 | CUGUGCCCUGCGACGCUGC | 5175 | GCAGCGUCGCAGGGCACAG |
| 2157 | CCUGCGACGCUGCGCUGAU | 5181 | AUCAGCGCAGCGUCGCAGG |
| 2159 | UGCGACGCUGCGCUGAUGA | 5183 | UCAUCAGCGCAGCGUCGCA |
| 2160 | GCGACGCUGCGCUGAUGAC | 5184 | GUCAUCAGCGCAGCGUCGC |
| 2161 | CGACGCUGCGCUGAUGACC | 5185 | GGUCAUCAGCGCAGCGUCG |
| 2162 | GACGCUGCGCUGAUGACCA | 5186 | UGGUCAUCAGCGCAGCGUC |
| 2163 | ACGCUGCGCUGAUGACCAG | 5187 | CUGGUCAUCAGCGCAGCGU |
| 2167 | UGCGCUGAUGACCAGCCGC | 5191 | GCGGCUGGUCAUCAGCGCA |
| 2168 | GCGCUGAUGACCAGCCGCC | 5192 | GGCGGCUGGUCAUCAGCGC |
| 2172 | UGAUGACCAGCCGCCAUCA | 5196 | UGAUGGCGGCUGGUCAUCA |
| 2173 | GAUGACCAGCCGCCAUCAA | 5197 | UUGAUGGCGGCUGGUCAUC |
| 2175 | UGACCAGCCGCCAUCAAUC | 5199 | GAUUGAUGGCGGCUGGUCA |
| 2181 | GCCGCCAUCAAUCCUGGAC | 5205 | GUCCAGGAUUGAUGGCGGC |
| 2183 | CGCCAUCAAUCCUGGACCC | 5207 | GGGUCCAGGAUUGAUGGCG |
| 2228 | GUGGCAAGAGGGUGGAUCG | 5252 | CGAUCCACCCUCUUGCCAC |
| 2288 | AUCCGGGCAACUCACCCUG | 5312 | CAGGGUGAGUUGCCCGGAU |
| 2289 | UCCGGGCAACUCACCCUGG | 5313 | CCAGGGUGAGUUGCCCGGA |
| 2307 | GACAGUCAGCUUGCGGAAU | 5331 | AUUCCGCAAGCUGACUGUC |
| 2308 | ACAGUCAGCUUGCGGAAUC | 5332 | GAUUCCGCAAGCUGACUGU |
| 2310 | AGUCAGCUUGCGGAAUCGG | 5334 | CCGAUUCCGCAAGCUGACU |
| 2369 | AGUGGAUACUGACUGCCCG | 5393 | CGGGCAGUCAGUAUCCACU |
| 2371 | UGGAUACUGACUGCCCGGC | 5395 | GCCGGGCAGUCAGUAUCCA |
| 2372 | GGAUACUGACUGCCCGGCA | 5396 | UGCCGGGCAGUCAGUAUCC |
| 2374 | AUACUGACUGCCCGGCAGU | 5398 | ACUGCCGGGCAGUCAGUAU |
| 2375 | UACUGACUGCCCGGCAGUG | 5399 | CACUGCCGGGCAGUCAGUA |
| 2378 | UGACUGCCCGGCAGUGCUU | 5402 | AAGCACUGCCGGGCAGUCA |
| 2382 | UGCCCGGCAGUGCUUCUCC | 5406 | GGAGAAGCACUGCCGGGCA |
| 2420 | CGGGCUAUGAGGUAUGGUU | 5444 | AACCAUACCUCAUAGCCCG |
| 2421 | GGGCUAUGAGGUAUGGUUG | 5445 | CAACCAUACCUCAUAGCCC |
| 2431 | GUAUGGUUGGGCACCCUGU | 5455 | ACAGGGUGCCCAACCAUAC |
| 2476 | AGCCUACAGCGGGUCCCAG | 5500 | CUGGGACCCGCUGUAGGCU |
| 2479 | CUACAGCGGGUCCCAGUAG | 5503 | CUACUGGGACCCGCUGUAG |
| 2480 | UACAGCGGGUCCCAGUAGC | 5504 | GCUACUGGGACCCGCUGUA |
| 2481 | ACAGCGGGUCCCAGUAGCC | 5505 | GGCUACUGGGACCCGCUGU |
| 2482 | CAGCGGGUCCCAGUAGCCA | 5506 | UGGCUACUGGGACCCGCUG |
| 2483 | AGCGGGUCCCAGUAGCCAA | 5507 | UUGGCUACUGGGACCCGCU |
| 2484 | GCGGGUCCCAGUAGCCAAG | 5508 | CUUGGCUACUGGGACCCGC |
| 2517 | CUCAGGCUCCCAGCUUGUC | 5541 | GACAAGCUGGGAGCCUGAG |
| 2645 | GGGGUGAGACCAAAGGUAC | 5669 | GUACCUUUGGUCUCACCCC |
| 2646 | GGGUGAGACCAAAGGUACG | 5670 | CGUACCUUUGGUCUCACCC |
| 2666 | GUAAUGACACAGUCCUAAA | 5690 | UUUAGGACUGUGUCAUUAC |
| 2667 | UAAUGACACAGUCCUAAAU | 5691 | AUUUAGGACUGUGUCAUUA |
| 2670 | UGACACAGUCCUAAAUGUG | 5694 | CACAUUUAGGACUGUGUCA |
| 2673 | CACAGUCCUAAAUGUGGCC | 5697 | GGCCACAUUUAGGACUGUG |
| 2675 | CAGUCCUAAAUGUGGCCUU | 5699 | AAGGCCACAUUUAGGACUG |
| 2676 | AGUCCUAAAUGUGGCCUUG | 5700 | CAAGGCCACAUUUAGGACU |
| 2707 | UCCAACCAGGAGUGUAACA | 5731 | UGUUACACUCCUGGUUGGA |
| 2709 | CAACCAGGAGUGUAACAUC | 5733 | GAUGUUACACUCCUGGUUG |
| 2710 | AACCAGGAGUGUAACAUCA | 5734 | UGAUGUUACACUCCUGGUU |
| 2712 | CCAGGAGUGUAACAUCAAG | 5736 | CUUGAUGUUACACUCCUGG |
| 2715 | GGAGUGUAACAUCAAGCAC | 5739 | GUGCUUGAUGUUACACUCC |
| 2716 | GAGUGUAACAUCAAGCACC | 5740 | GGUGCUUGAUGUUACACUC |
| 2718 | GUGUAACAUCAAGCACCGA | 5742 | UCGGUGCUUGAUGUUACAC |
| 2723 | ACAUCAAGCACCGAGGACG | 5747 | CGUCCUCGGUGCUUGAUGU |
| 2725 | AUCAAGCACCGAGGACGUG | 5749 | CACGUCCUCGGUGCUUGAU |
| 2815 | CCACUUGCCUGCUUUACCC | 5839 | GGGUAAAGCAGGCAAGUGG |
| 2820 | UGCCUGCUUUACCCACAAC | 5844 | GUUGUGGGUAAAGCAGGCA |
| 2857 | AUUAUAAUCCCCAACCGAG | 5881 | CUCGGUUGGGGAUUAUAAU |
| 2859 | UAUAAUCCCCAACCGAGUA | 5883 | UACUCGGUUGGGGAUUAUA |
| 2902 | GUCUUCACGCGUGUCUCUG | 5926 | CAGAGACACGCGUGAAGAC |
| 2903 | UCUUCACGCGUGUCUCUGU | 5927 | ACAGAGACACGCGUGAAGA |
| 2907 | CACGCGUGUCUCUGUGUUU | 5931 | AAACACAGAGACACGCGUG |
| 2998 | AACUUCUUGUCAGACAUAA | 6022 | UUAUGUCUGACAAGAAGUU |
| 2999 | ACUUCUUGUCAGACAUAAA | 6023 | UUUAUGUCUGACAAGAAGU |
| 3000 | CUUCUUGUCAGACAUAAAG | 6024 | CUUUAUGUCUGACAAGAAG |
| 3002 | UCUUGUCAGACAUAAAGCC | 6026 | GGCUUUAUGUCUGACAAGA |

[0282] The siRNAs in subset B have the following characteristics:
[0283] Cross-reactivity: With 19mer in human MST1 mRNA, with 17mer/19mer in NHP MST1
[0284] Specificity category: For human and NHP: AS2 or better, SS3 or better
[0285] miRNA seeds: AS+SS strand: seed region not conserved in human, mouse, and rat and not present in >4 species
[0286] Off-target frequency: ≤15 human off-targets matched with 2 mismatches in antisense strand
[0287] SNPs: siRNA target sites do not harbor SNPs with a MAF≥100 (pos. 2-18)

[0288] The siRNA sequences in subset B were further selected for absence of seed regions in the AS strand that are identical to a seed region of known human miRNA to yield subset C. Subset C includes 140 siRNAs whose base sequences are shown in Table 5.

TABLE 5
Sequences in siRNA subset C

| SEQ | | SEQ | |
|---|---|---|---|
| ID | sense strand | ID | antisense strand |
| NO: | sequence (5′-3′) | NO: | sequence (5′-3′) |
| 474 | AAAAGUUUAAUGUCACCCA | 3498 | UGGGUGACAUUAAACUUUU |
| 638 | GCCCUUGCAACUGACCUAU | 3662 | AUAGGUCAGUUGCAAGGGC |
| 639 | CCCUUGCAACUGACCUAUG | 3663 | CAUAGGUCAGUUGCAAGGG |
| 642 | UUGCAACUGACCUAUGGGA | 3666 | UCCCAUAGGUCAGUUGCAA |
| 643 | UGCAACUGACCUAUGGGAC | 3667 | GUCCCAUAGGUCAGUUGCA |
| 646 | AACUGACCUAUGGGACCUG | 3670 | CAGGUCCCAUAGGUCAGUU |
| 742 | GAGCCACCCAAUCCCGUAG | 3766 | CUACGGGAUUGGGUGGCUC |
| 743 | AGCCACCCAAUCCCGUAGG | 3767 | CCUACGGGAUUGGGUGGCU |
| 747 | ACCCAAUCCCGUAGGGACA | 3771 | UGUCCCUACGGGAUUGGGU |
| 749 | CCAAUCCCGUAGGGACAGG | 3773 | CCUGUCCCUACGGGAUUGG |
| 751 | AAUCCCGUAGGGACAGGUU | 3775 | AACCUGUCCCUACGGGAUU |
| 753 | UCCCGUAGGGACAGGUUUC | 3777 | GAAACCUGUCCCUACGGGA |
| 1041 | CGUGAGCAGCCAUGGUUGC | 4065 | GCAACCAUGGCUGCUCACG |
| 1042 | GUGAGCAGCCAUGGUUGCC | 4066 | GGCAACCAUGGCUGCUCAC |
| 1070 | CAUGGACUCAACACUCGCC | 4094 | GGCGAGUGUUGAGUCCAUG |
| 1071 | AUGGACUCAACACUCGCCC | 4095 | GGGCGAGUGUUGAGUCCAU |
| 1079 | AACACUCGCCCCACACGAG | 4103 | CUCGUGUGGGGCGAGUGUU |
| 1081 | CACUCGCCCCACACGAGGC | 4105 | GCCUCGUGUGGGGCGAGUG |
| 1082 | ACUCGCCCCACACGAGGCU | 4106 | AGCCUCGUGUGGGGCGAGU |
| 1162 | AACAAUGGGGUUGGGUACC | 4186 | GGUACCCAACCCCAUUGUU |
| 1163 | ACAAUGGGGUUGGGUACCG | 4187 | CGGUACCCAACCCCAUUGU |
| 1164 | CAAUGGGGUUGGGUACCGG | 4188 | CCGGUACCCAACCCCAUUG |
| 1170 | GGUUGGGUACCGGGGCACC | 4194 | GGUGCCCCGGUACCCAACC |
| 1220 | AGGCUUGGAGCCACAAGUU | 4244 | AACUUGUGGCUCCAAGCCU |
| 1309 | GGCGACCCCGGAGGUCCUU | 4333 | AAGGACCUCCGGGGUCGCC |
| 1312 | GACCCCGGAGGUCCUUGGU | 4336 | ACCAAGGACCUCCGGGGUC |
| 1313 | ACCCCGGAGGUCCUUGGUG | 4337 | CACCAAGGACCUCCGGGGU |
| 1314 | CCCCGGAGGUCCUUGGUGC | 4338 | GCACCAAGGACCUCCGGGG |
| 1365 | CUGCGGCAUCAAAUCCUGC | 4389 | GCAGGAUUUGAUGCCGCAG |
| 1368 | CGGCAUCAAAUCCUGCCGG | 4392 | CCGGCAGGAUUUGAUGCCG |
| 1369 | GGCAUCAAAUCCUGCCGGG | 4393 | CCCGGCAGGAUUUGAUGCC |
| 1370 | GCAUCAAAUCCUGCCGGGA | 4394 | UCCCGGCAGGAUUUGAUGC |
| 1371 | CAUCAAAUCCUGCCGGGAG | 4395 | CUCCCGGCAGGAUUUGAUG |
| 1373 | UCAAAUCCUGCCGGGAGGC | 4397 | GCCUCCCGGCAGGAUUUGA |
| 1440 | CACGGAGUCAGGGCGCGAG | 4464 | CUCGCGCCCUGACUCCGUG |
| 1490 | AGCACCCCUUCGAGCCGGG | 4514 | CCCGGCUCGAAGGGGUGCU |
| 1530 | GGACGACAACUAUUGCCGG | 4554 | CCGGCAAUAGUUGUCGUCC |
| 1531 | GACGACAACUAUUGCCGGA | 4555 | UCCGGCAAUAGUUGUCGUC |
| 1532 | ACGACAACUAUUGCCGGAA | 4556 | UUCCGGCAAUAGUUGUCGU |
| 1534 | GACAACUAUUGCCGGAAUC | 4558 | GAUUCCGGCAAUAGUUGUC |
| 1538 | ACUAUUGCCGGAAUCCUGA | 4562 | UCAGGAUUCCGGCAAUAGU |
| 1543 | UGCCGGAAUCCUGACGGCU | 4567 | AGCCGUCAGGAUUCCGGCA |
| 1544 | GCCGGAAUCCUGACGGCUC | 4568 | GAGCCGUCAGGAUUCCGGC |
| 1577 | GCUACACUACGGAUCCGCA | 4601 | UGCGGAUCCGUAGUGUAGC |
| 1597 | AUCGAGCGAGAGUUCUGUG | 4621 | CACAGAACUCUCGCUCGAU |
| 1598 | UCGAGCGAGAGUUCUGUGA | 4622 | UCACAGAACUCUCGCUCGA |
| 1601 | AGCGAGAGUUCUGUGACCU | 4625 | AGGUCACAGAACUCUCGCU |
| 1947 | AGGGGAGCAGUACCGCGGC | 4971 | GCCGCGGUACUGCUCCCCU |
| 1950 | GGAGCAGUACCGCGGCACG | 4974 | CGUGCCGCGGUACUGCUCC |
| 1951 | GAGCAGUACCGCGGCACGG | 4975 | CCGUGCCGCGGUACUGCUC |
| 1953 | GCAGUACCGCGGCACGGUC | 4977 | GACCGUGCCGCGGUACUGC |
| 1954 | CAGUACCGCGGCACGGUCA | 4978 | UGACCGUGCCGCGGUACUG |
| 1955 | AGUACCGCGGCACGGUCAG | 4979 | CUGACCGUGCCGCGGUACU |
| 1957 | UACCGCGGCACGGUCAGCA | 4981 | UGCUGACCGUGCCGCGGUA |
| 1959 | CCGCGGCACGGUCAGCAAG | 4983 | CUUGCUGACCGUGCCGCGG |
| 1960 | CGCGGCACGGUCAGCAAGA | 4984 | UCUUGCUGACCGUGCCGCG |
| 1961 | GCGGCACGGUCAGCAAGAC | 4985 | GUCUUGCUGACCGUGCCGC |
| 1963 | GGCACGGUCAGCAAGACCC | 4987 | GGGUCUUGCUGACCGUGCC |
| 1965 | CACGGUCAGCAAGACCCGC | 4989 | GCGGGUCUUGCUGACCGUG |
| 1968 | GGUCAGCAAGACCCGCAAG | 4992 | CUUGCGGGUCUUGCUGACC |
| 1972 | AGCAAGACCCGCAAGGGUG | 4996 | CACCCUUGCGGGUCUUGCU |
| 1974 | CAAGACCCGCAAGGGUGUC | 4998 | GACACCCUUGCGGGUCUUG |
| 1975 | AAGACCCGCAAGGGUGUCC | 4999 | GGACACCCUUGCGGGUCUU |
| 1976 | AGACCCGCAAGGGUGUCCA | 5000 | UGGACACCCUUGCGGGUCU |
| 1980 | CCGCAAGGGUGUCCAGUGC | 5004 | GCACUGGACACCCUUGCGG |
| 1995 | GUGCCAGCGCUGGUCCGCU | 5019 | AGCGGACCAGCGCUGGCAC |
| 1997 | GCCAGCGCUGGUCCGCUGA | 5021 | UCAGCGGACCAGCGCUGGC |
| 1998 | CCAGCGCUGGUCCGCUGAG | 5022 | CUCAGCGGACCAGCGCUGG |
| 2000 | AGCGCUGGUCCGCUGAGAC | 5024 | GUCUCAGCGGACCAGCGCU |
| 2001 | GCGCUGGUCCGCUGAGACG | 5025 | CGUCUCAGCGGACCAGCGC |
| 2019 | GCCGCACAAGCCGCAGUUC | 5043 | GAACUGCGGCUUGUGCGGC |
| 2020 | CCGCACAAGCCGCAGUUCA | 5044 | UGAACUGCGGCUUGUGCGG |
| 2022 | GCACAAGCCGCAGUUCACG | 5046 | CGUGAACUGCGGCUUGUGC |
| 2023 | CACAAGCCGCAGUUCACGU | 5047 | ACGUGAACUGCGGCUUGUG |
| 2024 | ACAAGCCGCAGUUCACGUU | 5048 | AACGUGAACUGCGGCUUGU |
| 2025 | CAAGCCGCAGUUCACGUUU | 5049 | AAACGUGAACUGCGGCUUG |
| 2026 | AAGCCGCAGUUCACGUUUA | 5050 | UAAACGUGAACUGCGGCUU |
| 2027 | AGCCGCAGUUCACGUUUAC | 5051 | GUAAACGUGAACUGCGGCU |
| 2029 | CCGCAGUUCACGUUUACCU | 5053 | AGGUAAACGUGAACUGCGG |
| 2083 | CGGAACCCAGAUGGGGAUA | 5107 | UAUCCCCAUCUGGGUUCCG |
| 2084 | GGAACCCAGAUGGGGAUAG | 5108 | CUAUCCCCAUCUGGGUUCC |
| 2086 | AACCCAGAUGGGGAUAGCC | 5110 | GGCUAUCCCCAUCUGGGUU |
| 2087 | ACCCAGAUGGGGAUAGCCA | 5111 | UGGCUAUCCCCAUCUGGGU |
| 2090 | CAGAUGGGGAUAGCCAUGG | 5114 | CCAUGGCUAUCCCCAUCUG |
| 2115 | GUGCUACACGAUGGACCCA | 5139 | UGGGUCCAUCGUGUAGCAC |
| 2139 | CCCAUUCGACUACUGUGCC | 5163 | GGCACAGUAGUCGAAUGGG |
| 2140 | CCAUUCGACUACUGUGCCC | 5164 | GGGCACAGUAGUCGAAUGG |
| 2141 | CAUUCGACUACUGUGCCCU | 5165 | AGGGCACAGUAGUCGAAUG |
| 2145 | CGACUACUGUGCCCUGCGA | 5169 | UCGCAGGGCACAGUAGUCG |
| 2146 | GACUACUGUGCCCUGCGAC | 5170 | GUCGCAGGGCACAGUAGUC |
| 2149 | UACUGUGCCCUGCGACGCU | 5173 | AGCGUCGCAGGGCACAGUA |
| 2151 | CUGUGCCCUGCGACGCUGC | 5175 | GCAGCGUCGCAGGGCACAG |
| 2157 | CCUGCGACGCUGCGCUGAU | 5181 | AUCAGCGCAGCGUCGCAGG |
| 2159 | UGCGACGCUGCGCUGAUGA | 5183 | UCAUCAGCGCAGCGUCGCA |
| 2160 | GCGACGCUGCGCUGAUGAC | 5184 | GUCAUCAGCGCAGCGUCGC |
| 2161 | CGACGCUGCGCUGAUGACC | 5185 | GGUCAUCAGCGCAGCGUCG |
| 2162 | GACGCUGCGCUGAUGACCA | 5186 | UGGUCAUCAGCGCAGCGUC |
| 2168 | GCGCUGAUGACCAGCCGCC | 5192 | GGCGGCUGGUCAUCAGCGC |
| 2172 | UGAUGACCAGCCGCCAUCA | 5196 | UGAUGGCGGCUGGUCAUCA |
| 2175 | UGACCAGCCGCCAUCAAUC | 5199 | GAUUGAUGGCGGCUGGUCA |
| 2181 | GCCGCCAUCAAUCCUGGAC | 5205 | GUCCAGGAUUGAUGGCGGC |
| 2183 | CGCCAUCAAUCCUGGACCC | 5207 | GGGUCCAGGAUUGAUGGCG |
| 2228 | GUGGCAAGAGGGUGGAUCG | 5252 | CGAUCCACCCUCUUGCCAC |
| 2288 | AUCCGGGCAACUCACCCUG | 5312 | CAGGGUGAGUUGCCCGGAU |
| 2308 | ACAGUCAGCUUGCGGAAUC | 5332 | GAUUCCGCAAGCUGACUGU |
| 2310 | AGUCAGCUUGCGGAAUCGG | 5334 | CCGAUUCCGCAAGCUGACU |
| 2371 | UGGAUACUGACUGCCCGGC | 5395 | GCCGGGCAGUCAGUAUCCA |
| 2372 | GGAUACUGACUGCCCGGCA | 5396 | UGCCGGGCAGUCAGUAUCC |
| 2374 | AUACUGACUGCCCGGCAGU | 5398 | ACUGCCGGGCAGUCAGUAU |
| 2375 | UACUGACUGCCCGGCAGUG | 5399 | CACUGCCGGGCAGUCAGUA |
| 2378 | UGACUGCCCGGCAGUGCUU | 5402 | AAGCACUGCCGGGCAGUCA |
| 2420 | CGGGCUAUGAGGUAUGGUU | 5444 | AACCAUACCUCAUAGCCCG |
| 2421 | GGGCUAUGAGGUAUGGUUG | 5445 | CAACCAUACCUCAUAGCCC |
| 2479 | CUACAGCGGGUCCCAGUAG | 5503 | CUACUGGGACCCGCUGUAG |
| 2480 | UACAGCGGGUCCCAGUAGC | 5504 | GCUACUGGGACCCGCUGUA |
| 2481 | ACAGCGGGUCCCAGUAGCC | 5505 | GGCUACUGGGACCCGCUGU |
| 2482 | CAGCGGGUCCCAGUAGCCA | 5506 | UGGCUACUGGGACCCGCUG |
| 2483 | AGCGGGUCCCAGUAGCCAA | 5507 | UUGGCUACUGGGACCCGCU |
| 2484 | GCGGGUCCCAGUAGCCAAG | 5508 | CUUGGCUACUGGGACCCGC |
| 2517 | CUCAGGCUCCCAGCUUGUC | 5541 | GACAAGCUGGGAGCCUGAG |
| 2646 | GGGUGAGACCAAAGGUACG | 5670 | CGUACCUUUGGUCUCACCC |
| 2667 | UAAUGACACAGUCCUAAAU | 5691 | AUUUAGGACUGUGUCAUUA |
| 2670 | UGACACAGUCCUAAAUGUG | 5694 | CACAUUUAGGACUGUGUCA |
| 2673 | CACAGUCCUAAAUGUGGCC | 5697 | GGCCACAUUUAGGACUGUG |
| 2707 | UCCAACCAGGAGUGUAACA | 5731 | UGUUACACUCCUGGUUGGA |
| 2709 | CAACCAGGAGUGUAACAUC | 5733 | GAUGUUACACUCCUGGUUG |
| 2710 | AACCAGGAGUGUAACAUCA | 5734 | UGAUGUUACACUCCUGGUU |
| 2712 | CCAGGAGUGUAACAUCAAG | 5736 | CUUGAUGUUACACUCCUGG |
| 2715 | GGAGUGUAACAUCAAGCAC | 5739 | GUGCUUGAUGUUACACUCC |
| 2725 | AUCAAGCACCGAGGACGUG | 5749 | CACGUCCUCGGUGCUUGAU |
| 2815 | CCACUUGCCUGCUUUACCC | 5839 | GGGUAAAGCAGGCAAGUGG |
| 2820 | UGCCUGCUUUACCCACAAC | 5844 | GUUGUGGGUAAAGCAGGCA |
| 2857 | AUUAUAAUCCCCAACCGAG | 5881 | CUCGGUUGGGGAUUAUAAU |
| 2859 | UAUAAUCCCCAACCGAGUA | 5883 | UACUCGGUUGGGGAUUAUA |
| 2902 | GUCUUCACGCGUGUCUCUG | 5926 | CAGAGACACGCGUGAAGAC |
| 2907 | CACGCGUGUCUCUGUGUUU | 5931 | AAACACAGAGACACGCGUG |
| 2998 | AACUUCUUGUCAGACAUAA | 6022 | UUAUGUCUGACAAGAAGUU |
| 2999 | ACUUCUUGUCAGACAUAAA | 6023 | UUUAUGUCUGACAAGAAGU |
| 3000 | CUUCUUGUCAGACAUAAAG | 6024 | CUUUAUGUCUGACAAGAAG |
| 3002 | UCUUGUCAGACAUAAAGCC | 6026 | GGCUUUAUGUCUGACAAGA |

[0289] The siRNAs in subset C have the following characteristics:
[0290] Cross-reactivity: With 19mer in human MST1 mRNA, with 17mer/19mer in NHP MST1
[0291] Specificity category: For human and NHP: AS2 or better, SS3 or better
[0292] miRNA seeds: AS+SS strand: seed region not conserved in human, mouse, and rat and not present in >4 species. AS strand: seed region not identical to seed region of known human miRNA
[0293] Off-target frequency: ≤15 human off-targets matched with 2 mismatches by antisense strand
[0294] SNPs: siRNA target sites do not harbor SNPs with a MAF≥100 (pos. 2-18)

[0295] The siRNA sequences in subset C were also selected for absence of seed regions in the AS or S strands that are identical to a seed region of known human miRNA to yield subset D. Subset D includes 102 siRNAs whose base sequences are shown in Table 6.

TABLE 6
Sequences in siRNA subset D

| SEQ | | SEQ | |
|---|---|---|---|
| ID | sense strand | ID | antisense strand |
| NO: | sequence (5′-3′) | NO: | sequence (5′-3′) |
| 598 | CACCAAACCUUCCUAACAC | 3622 | GUGUUAGGAAGGUUUGGUG |
| 642 | UUGCAACUGACCUAUGGGA | 3666 | UCCCAUAGGUCAGUUGCAA |
| 743 | AGCCACCCAAUCCCGUAGG | 3767 | CCUACGGGAUUGGGUGGCU |
| 747 | ACCCAAUCCCGUAGGGACA | 3771 | UGUCCCUACGGGAUUGGGU |
| 749 | CCAAUCCCGUAGGGACAGG | 3773 | CCUGUCCCUACGGGAUUGG |
| 751 | AAUCCCGUAGGGACAGGUU | 3775 | AACCUGUCCCUACGGGAUU |
| 753 | UCCCGUAGGGACAGGUUUC | 3777 | GAAACCUGUCCCUACGGGA |
| 1041 | CGUGAGCAGCCAUGGUUGC | 4065 | GCAACCAUGGCUGCUCACG |
| 1042 | GUGAGCAGCCAUGGUUGCC | 4066 | GGCAACCAUGGCUGCUCAC |
| 1048 | AGCCAUGGUUGCCAACUGC | 4072 | GCAGUUGGCAACCAUGGCU |
| 1070 | CAUGGACUCAACACUCGCC | 4094 | GGCGAGUGUUGAGUCCAUG |
| 1079 | AACACUCGCCCCACACGAG | 4103 | CUCGUGUGGGGCGAGUGUU |
| 1081 | CACUCGCCCCACACGAGGC | 4105 | GCCUCGUGUGGGGCGAGUG |
| 1082 | ACUCGCCCCACACGAGGCU | 4106 | AGCCUCGUGUGGGGCGAGU |
| 1163 | ACAAUGGGGUUGGGUACCG | 4187 | CGGUACCCAACCCCAUUGU |
| 1220 | AGGCUUGGAGCCACAAGUU | 4244 | AACUUGUGGCUCCAAGCCU |
| 1221 | GGCUUGGAGCCACAAGUUC | 4245 | GAACUUGUGGCUCCAAGCC |
| 1266 | UCUCCGGAAUGGCCUGGAA | 4290 | UUCCAGGCCAUUCCGGAGA |
| 1309 | GGCGACCCCGGAGGUCCUU | 4333 | AAGGACCUCCGGGGUCGCC |
| 1312 | GACCCCGGAGGUCCUUGGU | 4336 | ACCAAGGACCUCCGGGGUC |
| 1365 | CUGCGGCAUCAAAUCCUGC | 4389 | GCAGGAUUUGAUGCCGCAG |
| 1368 | CGGCAUCAAAUCCUGCCGG | 4392 | CCGGCAGGAUUUGAUGCCG |
| 1370 | GCAUCAAAUCCUGCCGGGA | 4394 | UCCCGGCAGGAUUUGAUGC |
| 1371 | CAUCAAAUCCUGCCGGGAG | 4395 | CUCCCGGCAGGAUUUGAUG |
| 1381 | UGCCGGGAGGCCGCGUGUG | 4405 | CACACGCGGCCUCCCGGCA |
| 1440 | CACGGAGUCAGGGCGCGAG | 4464 | CUCGCGCCCUGACUCCGUG |
| 1454 | GCGAGUGCCAGCGCUGGGA | 4478 | UCCCAGCGCUGGCACUCGC |
| 1490 | AGCACCCCUUCGAGCCGGG | 4514 | CCCGGCUCGAAGGGGUGCU |
| 1530 | GGACGACAACUAUUGCCGG | 4554 | CCGGCAAUAGUUGUCGUCC |
| 1531 | GACGACAACUAUUGCCGGA | 4555 | UCCGGCAAUAGUUGUCGUC |
| 1532 | ACGACAACUAUUGCCGGAA | 4556 | UUCCGGCAAUAGUUGUCGU |
| 1534 | GACAACUAUUGCCGGAAUC | 4558 | GAUUCCGGCAAUAGUUGUC |
| 1538 | ACUAUUGCCGGAAUCCUGA | 4562 | UCAGGAUUCCGGCAAUAGU |
| 1543 | UGCCGGAAUCCUGACGGCU | 4567 | AGCCGUCAGGAUUCCGGCA |
| 1544 | GCCGGAAUCCUGACGGCUC | 4568 | GAGCCGUCAGGAUUCCGGC |
| 1577 | GCUACACUACGGAUCCGCA | 4601 | UGCGGAUCCGUAGUGUAGC |
| 1597 | AUCGAGCGAGAGUUCUGUG | 4621 | CACAGAACUCUCGCUCGAU |
| 1598 | UCGAGCGAGAGUUCUGUGA | 4622 | UCACAGAACUCUCGCUCGA |
| 1601 | AGCGAGAGUUCUGUGACCU | 4625 | AGGUCACAGAACUCUCGCU |
| 1953 | GCAGUACCGCGGCACGGUC | 4977 | GACCGUGCCGCGGUACUGC |
| 1955 | AGUACCGCGGCACGGUCAG | 4979 | CUGACCGUGCCGCGGUACU |
| 1957 | UACCGCGGCACGGUCAGCA | 4981 | UGCUGACCGUGCCGCGGUA |
| 1959 | CCGCGGCACGGUCAGCAAG | 4983 | CUUGCUGACCGUGCCGCGG |
| 1961 | GCGGCACGGUCAGCAAGAC | 4985 | GUCUUGCUGACCGUGCCGC |
| 1965 | CACGGUCAGCAAGACCCGC | 4989 | GCGGGUCUUGCUGACCGUG |
| 1968 | GGUCAGCAAGACCCGCAAG | 4992 | CUUGCGGGUCUUGCUGACC |
| 1975 | AAGACCCGCAAGGGUGUCC | 4999 | GGACACCCUUGCGGGUCUU |
| 1976 | AGACCCGCAAGGGUGUCCA | 5000 | UGGACACCCUUGCGGGUCU |
| 1980 | CCGCAAGGGUGUCCAGUGC | 5004 | GCACUGGACACCCUUGCGG |
| 1998 | CCAGCGCUGGUCCGCUGAG | 5022 | CUCAGCGGACCAGCGCUGG |
| 2000 | AGCGCUGGUCCGCUGAGAC | 5024 | GUCUCAGCGGACCAGCGCU |
| 2001 | GCGCUGGUCCGCUGAGACG | 5025 | CGUCUCAGCGGACCAGCGC |
| 2019 | GCCGCACAAGCCGCAGUUC | 5043 | GAACUGCGGCUUGUGCGGC |
| 2020 | CCGCACAAGCCGCAGUUCA | 5044 | UGAACUGCGGCUUGUGCGG |
| 2023 | CACAAGCCGCAGUUCACGU | 5047 | ACGUGAACUGCGGCUUGUG |
| 2024 | ACAAGCCGCAGUUCACGUU | 5048 | AACGUGAACUGCGGCUUGU |
| 2025 | CAAGCCGCAGUUCACGUUU | 5049 | AAACGUGAACUGCGGCUUG |
| 2027 | AGCCGCAGUUCACGUUUAC | 5051 | GUAAACGUGAACUGCGGCU |
| 2029 | CCGCAGUUCACGUUUACCU | 5053 | AGGUAAACGUGAACUGCGG |
| 2083 | CGGAACCCAGAUGGGGAUA | 5107 | UAUCCCCAUCUGGGUUCCG |
| 2084 | GGAACCCAGAUGGGGAUAG | 5108 | CUAUCCCCAUCUGGGUUCC |
| 2087 | ACCCAGAUGGGGAUAGCCA | 5111 | UGGCUAUCCCCAUCUGGGU |
| 2090 | CAGAUGGGGAUAGCCAUGG | 5114 | CCAUGGCUAUCCCCAUCUG |
| 2091 | AGAUGGGGAUAGCCAUGGG | 5115 | CCCAUGGCUAUCCCCAUCU |
| 2139 | CCCAUUCGACUACUGUGCC | 5163 | GGCACAGUAGUCGAAUGGG |
| 2140 | CCAUUCGACUACUGUGCCC | 5164 | GGGCACAGUAGUCGAAUGG |
| 2141 | CAUUCGACUACUGUGCCCU | 5165 | AGGGCACAGUAGUCGAAUG |
| 2145 | CGACUACUGUGCCCUGCGA | 5169 | UCGCAGGGCACAGUAGUCG |
| 2146 | GACUACUGUGCCCUGCGAC | 5170 | GUCGCAGGGCACAGUAGUC |
| 2159 | UGCGACGCUGCGCUGAUGA | 5183 | UCAUCAGCGCAGCGUCGCA |
| 2160 | GCGACGCUGCGCUGAUGAC | 5184 | GUCAUCAGCGCAGCGUCGC |
| 2161 | CGACGCUGCGCUGAUGACC | 5185 | GGUCAUCAGCGCAGCGUCG |
| 2162 | GACGCUGCGCUGAUGACCA | 5186 | UGGUCAUCAGCGCAGCGUC |
| 2172 | UGAUGACCAGCCGCCAUCA | 5196 | UGAUGGCGGCUGGUCAUCA |
| 2175 | UGACCAGCCGCCAUCAAUC | 5199 | GAUUGAUGGCGGCUGGUCA |
| 2181 | GCCGCCAUCAAUCCUGGAC | 5205 | GUCCAGGAUUGAUGGCGGC |
| 2183 | CGCCAUCAAUCCUGGACCC | 5207 | GGGUCCAGGAUUGAUGGCG |
| 2228 | GUGGCAAGAGGGUGGAUCG | 5252 | CGAUCCACCCUCUUGCCAC |
| 2310 | AGUCAGCUUGCGGAAUCGG | 5334 | CCGAUUCCGCAAGCUGACU |
| 2371 | UGGAUACUGACUGCCCGGC | 5395 | GCCGGGCAGUCAGUAUCCA |
| 2372 | GGAUACUGACUGCCCGGCA | 5396 | UGCCGGGCAGUCAGUAUCC |
| 2374 | AUACUGACUGCCCGGCAGU | 5398 | ACUGCCGGGCAGUCAGUAU |
| 2421 | GGGCUAUGAGGUAUGGUUG | 5445 | CAACCAUACCUCAUAGCCC |
| 2479 | CUACAGCGGGUCCCAGUAG | 5503 | CUACUGGGACCCGCUGUAG |
| 2480 | UACAGCGGGUCCCAGUAGC | 5504 | GCUACUGGGACCCGCUGUA |
| 2481 | ACAGCGGGUCCCAGUAGCC | 5505 | GGCUACUGGGACCCGCUGU |
| 2484 | GCGGGUCCCAGUAGCCAAG | 5508 | CUUGGCUACUGGGACCCGC |
| 2498 | CCAAGAUGGUGUGUGGGCC | 5522 | GGCCCACACACCAUCUUGG |
| 2517 | CUCAGGCUCCCAGCUUGUC | 5541 | GACAAGCUGGGAGCCUGAG |
| 2628 | GUGUGAGAUUGCAGGCUGG | 5652 | CCAGCCUGCAAUCUCACAC |
| 2667 | UAAUGACACAGUCCUAAAU | 5691 | AUUUAGGACUGUGUCAUUA |
| 2673 | CACAGUCCUAAAUGUGGCC | 5697 | GGCCACAUUUAGGACUGUG |
| 2707 | UCCAACCAGGAGUGUAACA | 5731 | UGUUACACUCCUGGUUGGA |
| 2709 | CAACCAGGAGUGUAACAUC | 5733 | GAUGUUACACUCCUGGUUG |
| 2725 | AUCAAGCACCGAGGACGUG | 5749 | CACGUCCUCGGUGCUUGAU |
| 2844 | GGUCCUGGAAGGAAUUAUA | 5868 | UAUAAUUCCUUCCAGGACC |
| 2857 | AUUAUAAUCCCCAACCGAG | 5881 | CUCGGUUGGGGAUUAUAAU |
| 2859 | UAUAAUCCCCAACCGAGUA | 5883 | UACUCGGUUGGGGAUUAUA |
| 2902 | GUCUUCACGCGUGUCUCUG | 5926 | CAGAGACACGCGUGAAGAC |
| 2907 | CACGCGUGUCUCUGUGUUU | 5931 | AAACACAGAGACACGCGUG |
| 2998 | AACUUCUUGUCAGACAUAA | 6022 | UUAUGUCUGACAAGAAGUU |
| 3004 | UUGUCAGACAUAAAGCCAU | 6028 | AUGGCUUUAUGUCUGACAA |

[0296] The siRNAs in subset D have the following characteristics:
[0297] Cross-reactivity: With 19mer in human MST1 mRNA, with 17mer/19mer in NHP MST1
[0298] Specificity category: For human and NHP: AS2 or better, SS3 or better
[0299] miRNA seeds: AS+SS strand: seed region not conserved in human, mouse, and rat and not present in >4 species. AS+SS strand: seed region not identical to seed region of known human miRNA
[0300] Off-target frequency: ≤20 human off-targets matched with 2 mismatches by antisense strand
[0301] SNPs: siRNA target sites do not harbor SNPs with a MAF≥100 (pos. 2-18)

[0302] The siRNA sequences in subset D were further selected for more stringent specificity to yield subset E. Subset E includes 91 siRNAs whose base sequences are shown in Table 7.

TABLE 7
Sequences in siRNA subset E

| SEQ | | SEQ | |
|---|---|---|---|
| ID | sense strand | ID | antisense strand |
| NO: | sequence (5′-3′) | NO: | sequence (5′-3′) |
| 642 | UUGCAACUGACCUAUGGGA | 3666 | UCCCAUAGGUCAGUUGCAA |
| 743 | AGCCACCCAAUCCCGUAGG | 3767 | CCUACGGGAUUGGGUGGCU |
| 747 | ACCCAAUCCCGUAGGGACA | 3771 | UGUCCCUACGGGAUUGGGU |
| 749 | CCAAUCCCGUAGGGACAGG | 3773 | CCUGUCCCUACGGGAUUGG |
| 751 | AAUCCCGUAGGGACAGGUU | 3775 | AACCUGUCCCUACGGGAUU |
| 753 | UCCCGUAGGGACAGGUUUC | 3777 | GAAACCUGUCCCUACGGGA |
| 1041 | CGUGAGCAGCCAUGGUUGC | 4065 | GCAACCAUGGCUGCUCACG |
| 1042 | GUGAGCAGCCAUGGUUGCC | 4066 | GGCAACCAUGGCUGCUCAC |
| 1070 | CAUGGACUCAACACUCGCC | 4094 | GGCGAGUGUUGAGUCCAUG |
| 1079 | AACACUCGCCCCACACGAG | 4103 | CUCGUGUGGGGCGAGUGUU |
| 1081 | CACUCGCCCCACACGAGGC | 4105 | GCCUCGUGUGGGGCGAGUG |
| 1082 | ACUCGCCCCACACGAGGCU | 4106 | AGCCUCGUGUGGGGCGAGU |
| 1163 | ACAAUGGGGUUGGGUACCG | 4187 | CGGUACCCAACCCCAUUGU |
| 1220 | AGGCUUGGAGCCACAAGUU | 4244 | AACUUGUGGCUCCAAGCCU |
| 1309 | GGCGACCCCGGAGGUCCUU | 4333 | AAGGACCUCCGGGGUCGCC |
| 1312 | GACCCCGGAGGUCCUUGGU | 4336 | ACCAAGGACCUCCGGGGUC |
| 1365 | CUGCGGCAUCAAAUCCUGC | 4389 | GCAGGAUUUGAUGCCGCAG |
| 1368 | CGGCAUCAAAUCCUGCCGG | 4392 | CCGGCAGGAUUUGAUGCCG |
| 1370 | GCAUCAAAUCCUGCCGGGA | 4394 | UCCCGGCAGGAUUUGAUGC |
| 1371 | CAUCAAAUCCUGCCGGGAG | 4395 | CUCCCGGCAGGAUUUGAUG |
| 1440 | CACGGAGUCAGGGCGCGAG | 4464 | CUCGCGCCCUGACUCCGUG |
| 1490 | AGCACCCCUUCGAGCCGGG | 4514 | CCCGGCUCGAAGGGGUGCU |
| 1530 | GGACGACAACUAUUGCCGG | 4554 | CCGGCAAUAGUUGUCGUCC |
| 1531 | GACGACAACUAUUGCCGGA | 4555 | UCCGGCAAUAGUUGUCGUC |
| 1532 | ACGACAACUAUUGCCGGAA | 4556 | UUCCGGCAAUAGUUGUCGU |
| 1534 | GACAACUAUUGCCGGAAUC | 4558 | GAUUCCGGCAAUAGUUGUC |
| 1538 | ACUAUUGCCGGAAUCCUGA | 4562 | UCAGGAUUCCGGCAAUAGU |
| 1543 | UGCCGGAAUCCUGACGGCU | 4567 | AGCCGUCAGGAUUCCGGCA |
| 1544 | GCCGGAAUCCUGACGGCUC | 4568 | GAGCCGUCAGGAUUCCGGC |
| 1577 | GCUACACUACGGAUCCGCA | 4601 | UGCGGAUCCGUAGUGUAGC |
| 1597 | AUCGAGCGAGAGUUCUGUG | 4621 | CACAGAACUCUCGCUCGAU |
| 1598 | UCGAGCGAGAGUUCUGUGA | 4622 | UCACAGAACUCUCGCUCGA |
| 1601 | AGCGAGAGUUCUGUGACCU | 4625 | AGGUCACAGAACUCUCGCU |
| 1953 | GCAGUACCGCGGCACGGUC | 4977 | GACCGUGCCGCGGUACUGC |
| 1955 | AGUACCGCGGCACGGUCAG | 4979 | CUGACCGUGCCGCGGUACU |
| 1957 | UACCGCGGCACGGUCAGCA | 4981 | UGCUGACCGUGCCGCGGUA |
| 1959 | CCGCGGCACGGUCAGCAAG | 4983 | CUUGCUGACCGUGCCGCGG |
| 1961 | GCGGCACGGUCAGCAAGAC | 4985 | GUCUUGCUGACCGUGCCGC |
| 1965 | CACGGUCAGCAAGACCCGC | 4989 | GCGGGUCUUGCUGACCGUG |
| 1968 | GGUCAGCAAGACCCGCAAG | 4992 | CUUGCGGGUCUUGCUGACC |
| 1975 | AAGACCCGCAAGGGUGUCC | 4999 | GGACACCCUUGCGGGUCUU |
| 1976 | AGACCCGCAAGGGUGUCCA | 5000 | UGGACACCCUUGCGGGUCU |
| 1980 | CCGCAAGGGUGUCCAGUGC | 5004 | GCACUGGACACCCUUGCGG |
| 1998 | CCAGCGCUGGUCCGCUGAG | 5022 | CUCAGCGGACCAGCGCUGG |
| 2000 | AGCGCUGGUCCGCUGAGAC | 5024 | GUCUCAGCGGACCAGCGCU |
| 2001 | GCGCUGGUCCGCUGAGACG | 5025 | CGUCUCAGCGGACCAGCGC |
| 2019 | GCCGCACAAGCCGCAGUUC | 5043 | GAACUGCGGCUUGUGCGGC |
| 2020 | CCGCACAAGCCGCAGUUCA | 5044 | UGAACUGCGGCUUGUGCGG |
| 2023 | CACAAGCCGCAGUUCACGU | 5047 | ACGUGAACUGCGGCUUGUG |
| 2024 | ACAAGCCGCAGUUCACGUU | 5048 | AACGUGAACUGCGGCUUGU |
| 2025 | CAAGCCGCAGUUCACGUUU | 5049 | AAACGUGAACUGCGGCUUG |
| 2027 | AGCCGCAGUUCACGUUUAC | 5051 | GUAAACGUGAACUGCGGCU |
| 2029 | CCGCAGUUCACGUUUACCU | 5053 | AGGUAAACGUGAACUGCGG |
| 2083 | CGGAACCCAGAUGGGGAUA | 5107 | UAUCCCCAUCUGGGUUCCG |
| 2084 | GGAACCCAGAUGGGGAUAG | 5108 | CUAUCCCCAUCUGGGUUCC |
| 2087 | ACCCAGAUGGGGAUAGCCA | 5111 | UGGCUAUCCCCAUCUGGGU |
| 2090 | CAGAUGGGGAUAGCCAUGG | 5114 | CCAUGGCUAUCCCCAUCUG |
| 2139 | CCCAUUCGACUACUGUGCC | 5163 | GGCACAGUAGUCGAAUGGG |
| 2140 | CCAUUCGACUACUGUGCCC | 5164 | GGGCACAGUAGUCGAAUGG |
| 2141 | CAUUCGACUACUGUGCCCU | 5165 | AGGGCACAGUAGUCGAAUG |
| 2145 | CGACUACUGUGCCCUGCGA | 5169 | UCGCAGGGCACAGUAGUCG |
| 2146 | GACUACUGUGCCCUGCGAC | 5170 | GUCGCAGGGCACAGUAGUC |
| 2159 | UGCGACGCUGCGCUGAUGA | 5183 | UCAUCAGCGCAGCGUCGCA |
| 2160 | GCGACGCUGCGCUGAUGAC | 5184 | GUCAUCAGCGCAGCGUCGC |
| 2161 | CGACGCUGCGCUGAUGACC | 5185 | GGUCAUCAGCGCAGCGUCG |
| 2162 | GACGCUGCGCUGAUGACCA | 5186 | UGGUCAUCAGCGCAGCGUC |
| 2172 | UGAUGACCAGCCGCCAUCA | 5196 | UGAUGGCGGCUGGUCAUCA |
| 2175 | UGACCAGCCGCCAUCAAUC | 5199 | GAUUGAUGGCGGCUGGUCA |
| 2181 | GCCGCCAUCAAUCCUGGAC | 5205 | GUCCAGGAUUGAUGGCGGC |
| 2183 | CGCCAUCAAUCCUGGACCC | 5207 | GGGUCCAGGAUUGAUGGCG |
| 2228 | GUGGCAAGAGGGUGGAUCG | 5252 | CGAUCCACCCUCUUGCCAC |
| 2310 | AGUCAGCUUGCGGAAUCGG | 5334 | CCGAUUCCGCAAGCUGACU |
| 2371 | UGGAUACUGACUGCCCGGC | 5395 | GCCGGGCAGUCAGUAUCCA |
| 2372 | GGAUACUGACUGCCCGGCA | 5396 | UGCCGGGCAGUCAGUAUCC |
| 2374 | AUACUGACUGCCCGGCAGU | 5398 | ACUGCCGGGCAGUCAGUAU |
| 2421 | GGGCUAUGAGGUAUGGUUG | 5445 | CAACCAUACCUCAUAGCCC |
| 2479 | CUACAGCGGGUCCCAGUAG | 5503 | CUACUGGGACCCGCUGUAG |
| 2480 | UACAGCGGGUCCCAGUAGC | 5504 | GCUACUGGGACCCGCUGUA |
| 2481 | ACAGCGGGUCCCAGUAGCC | 5505 | GGCUACUGGGACCCGCUGU |
| 2484 | GCGGGUCCCAGUAGCCAAG | 5508 | CUUGGCUACUGGGACCCGC |
| 2517 | CUCAGGCUCCCAGCUUGUC | 5541 | GACAAGCUGGGAGCCUGAG |
| 2667 | UAAUGACACAGUCCUAAAU | 5691 | AUUUAGGACUGUGUCAUUA |
| 2673 | CACAGUCCUAAAUGUGGCC | 5697 | GGCCACAUUUAGGACUGUG |
| 2707 | UCCAACCAGGAGUGUAACA | 5731 | UGUUACACUCCUGGUUGGA |
| 2709 | CAACCAGGAGUGUAACAUC | 5733 | GAUGUUACACUCCUGGUUG |
| 2725 | AUCAAGCACCGAGGACGUG | 5749 | CACGUCCUCGGUGCUUGAU |
| 2857 | AUUAUAAUCCCCAACCGAG | 5881 | CUCGGUUGGGGAUUAUAAU |
| 2859 | UAUAAUCCCCAACCGAGUA | 5883 | UACUCGGUUGGGGAUUAUA |
| 2902 | GUCUUCACGCGUGUCUCUG | 5926 | CAGAGACACGCGUGAAGAC |
| 2907 | CACGCGUGUCUCUGUGUUU | 5931 | AAACACAGAGACACGCGUG |
| 2998 | AACUUCUUGUCAGACAUAA | 6022 | UUAUGUCUGACAAGAAGUU |

[0303] The siRNAs in subset E have the following characteristics:
[0304] Cross-reactivity: With 19mer in human MST1 mRNA, with 17mer/19mer in NHP MST1
[0305] Specificity category: For human and NHP: AS2 or better, SS3 or better
[0306] miRNA seeds: AS+SS strand: seed region not conserved in human, mouse, and rat and not present in >4 species. AS+SS strand: seed region not identical to seed region of known human miRNA
[0307] Off-target frequency: ≤15 human off-targets matched with 2 mismatches by antisense strand
[0308] SNPs: siRNA target sites do not harbor SNPs with a MAF 100 (pos. 2-18)

[0309] Subset F includes 38 siRNAs. The siRNAs in subset F include siRNAs from subset A and are included in Table 8. In some cases, the sense strand of any of the siRNAs of subset F comprises modification pattern 6S (Table 9). In some cases, the antisense strand of any of the siRNAs of subset F comprises modification pattern 7AS (Table 9). In some cases, the sense strand of any of the siRNAs of subset F contains an alternative modification pattern (Table 10). In some cases, the antisense strand of any of the siRNAs of subset F comprises modification pattern 7AS (Table 10). The siRNAs in subset F may comprise any other modification pattern(s). In Table 9 and Table 10, Nf (e.g. Af, Cf, Gf, Tf, or Uf) is a 2′ fluoro-modified nucleoside, n (e.g. a, c, g, t, or u) is a 2′ O-methyl modified nucleoside, and “s” is a phosphorothioate linkage.

TABLE 8
Sequences in siRNA subset F

| SEQ | | SEQ | |
|---|---|---|---|
| ID | sense strand | ID | antisense strand |
| NO: | sequence (5′-3′) | NO: | sequence (5′-3′) |
| 424 | AGCUGGGGCAAGUAAUUUU | 3448 | AAAAUUACUUGCCCCAGCU |
| 474 | AAAAGUUUAAUGUCACCCA | 3498 | UGGGUGACAUUAAACUUUU |
| 480 | UUAAUGUCACCCAGGGGCU | 3504 | AGCCCCUGGGUGACAUUAA |
| 587 | UCAAGUGUCCCCACCAAAC | 3611 | GUUUGGUGGGGACACUUGA |
| 597 | CCACCAAACCUUCCUAACA | 3621 | UGUUAGGAAGGUUUGGUGG |
| 598 | CACCAAACCUUCCUAACAC | 3622 | GUGUUAGGAAGGUUUGGUG |
| 639 | CCCUUGCAACUGACCUAUG | 3663 | CAUAGGUCAGUUGCAAGGG |
| 642 | UUGCAACUGACCUAUGGGA | 3666 | UCCCAUAGGUCAGUUGCAA |
| 643 | UGCAACUGACCUAUGGGAC | 3667 | GUCCCAUAGGUCAGUUGCA |
| 751 | AAUCCCGUAGGGACAGGUU | 3775 | AACCUGUCCCUACGGGAUU |
| 1162 | AACAAUGGGGUUGGGUACC | 4186 | GGUACCCAACCCCAUUGUU |
| 1533 | CGACAACUAUUGCCGGAAU | 4557 | AUUCCGGCAAUAGUUGUCG |
| 1534 | GACAACUAUUGCCGGAAUC | 4558 | GAUUCCGGCAAUAGUUGUC |
| 1579 | UACACUACGGAUCCGCAGA | 4603 | UCUGCGGAUCCGUAGUGUA |
| 1597 | AUCGAGCGAGAGUUCUGUG | 4621 | CACAGAACUCUCGCUCGAU |
| 2025 | CAAGCCGCAGUUCACGUUU | 5049 | AAACGUGAACUGCGGCUUG |
| 2026 | AAGCCGCAGUUCACGUUUA | 5050 | UAAACGUGAACUGCGGCUU |
| 2027 | AGCCGCAGUUCACGUUUAC | 5051 | GUAAACGUGAACUGCGGCU |
| 2307 | GACAGUCAGCUUGCGGAAU | 5331 | AUUCCGCAAGCUGACUGUC |
| 2308 | ACAGUCAGCUUGCGGAAUC | 5332 | GAUUCCGCAAGCUGACUGU |
| 2420 | CGGGCUAUGAGGUAUGGUU | 5444 | AACCAUACCUCAUAGCCCG |
| 2421 | GGGCUAUGAGGUAUGGUUG | 5445 | CAACCAUACCUCAUAGCCC |
| 2596 | CCUGAAUGGUAUGUGGUGC | 5620 | GCACCACAUACCAUUCAGG |
| 2666 | GUAAUGACACAGUCCUAAA | 5690 | UUUAGGACUGUGUCAUUAC |
| 2667 | UAAUGACACAGUCCUAAAU | 5691 | AUUUAGGACUGUGUCAUUA |
| 2673 | CACAGUCCUAAAUGUGGCC | 5697 | GGCCACAUUUAGGACUGUG |
| 2675 | CAGUCCUAAAUGUGGCCUU | 5699 | AAGGCCACAUUUAGGACUG |
| 2707 | UCCAACCAGGAGUGUAACA | 5731 | UGUUACACUCCUGGUUGGA |
| 2709 | CAACCAGGAGUGUAACAUC | 5733 | GAUGUUACACUCCUGGUUG |
| 2712 | CCAGGAGUGUAACAUCAAG | 5736 | CUUGAUGUUACACUCCUGG |
| 2716 | GAGUGUAACAUCAAGCACC | 5740 | GGUGCUUGAUGUUACACUC |
| 2820 | UGCCUGCUUUACCCACAAC | 5844 | GUUGUGGGUAAAGCAGGCA |
| 2844 | GGUCCUGGAAGGAAUUAUA | 5868 | UAUAAUUCCUUCCAGGACC |
| 2859 | UAUAAUCCCCAACCGAGUA | 5883 | UACUCGGUUGGGGAUUAUA |
| 2903 | UCUUCACGCGUGUCUCUGU | 5927 | ACAGAGACACGCGUGAAGA |
| 2907 | CACGCGUGUCUCUGUGUUU | 5931 | AAACACAGAGACACGCGUG |
| 2998 | AACUUCUUGUCAGACAUAA | 6022 | UUAUGUCUGACAAGAAGUU |
| 3000 | CUUCUUGUCAGACAUAAAG | 6024 | CUUUAUGUCUGACAAGAAG |

TABLE 9
Modified siRNA subset F sequences

| SEQ ID | sense strand sequence | SEQ ID | antisense strand sequence |
|---|---|---|---|
| NO: | (5′-3′) | NO: | (5′-3′) |
| 6049 | AfsgsCfuGfgGfgCfaAfgUfaAf | 6087 | usAfsaAfuUfaCfuUfgCfcCfcA |
| | uUfuAfsusu | | fgCfususu |
| 6050 | AfsasAfaGfuUfuAfaUfgUfcAf | 6088 | usGfsgGfuGfaCfaUfuAfaAfcU |
| | cCfcAfsusu | | fuUfususu |
| 6051 | UfsusAfaUfgUfcAfcCfcAfgGf | 6089 | usGfscCfcCfuGfgGfuGfaCfaU |
| | gGfcAfsusu | | fuAfasusu |
| 6052 | UfscsAfaGfuGfuCfcCfcAfcCf | 6090 | usUfsuUfgGfuGfgGfgAfcAfcU |
| | aAfaAfsusu | | fuGfasusu |
| 6053 | CfscsAfcCfaAfaCfcUfuCfcUf | 6091 | usGfsuUfaGfgAfaGfgUfuUfgG |
| | aAfcAfsusu | | fuGfgsusu |
| 6054 | CfsasCfcAfaAfcCfuUfcCfuAf | 6092 | usUfsgUfuAfgGfaAfgGfuUfuG |
| | aCfaAfsusu | | fgUfgsusu |
| 6055 | CfscsCfuUfgCfaAfcUfgAfcCf | 6093 | usAfsuAfgGfuCfaGfuUfgCfaA |
| | uAfuAfsusu | | fgGfgsusu |
| 6056 | UfsusGfcAfaCfuGfaCfcUfaUf | 6094 | usCfscCfaUfaGfgUfcAfgUfuG |
| | gGfgAfsusu | | fcAfasusu |
| 6057 | UfsgsCfaAfcUfgAfcCfuAfuGf | 6095 | usUfscCfcAfuAfgGfuCfaGfuU |
| | gGfaAfsusu | | fgCfasusu |
| 6058 | AfsasUfcCfcGfuAfgGfgAfcAf | 6096 | usAfscCfuGfuCfcCfuAfcGfgG |
| | gGfuAfsusu | | faUfususu |
| 6059 | AfsasCfaAfuGfgGfgUfuGfgGf | 6097 | usGfsuAfcCfcAfaCfcCfcAfuU |
| | uAfcAfsusu | | fgUfususu |
| 6060 | CfsgsAfcAfaCfuAfuUfgCfcGf | 6098 | usUfsuCfcGfgCfaAfuAfgUfuG |
| | gAfaAfsusu | | fuCfgsusu |
| 6061 | GfsasCfaAfcUfaUfuGfcCfgGf | 6099 | usAfsuUfcCfgGfcAfaUfaGfuU |
| | aAfuAfsusu | | fgUfcsusu |
| 6062 | UfsasCfaCfuAfcGfgAfuCfcGf | 6100 | usCfsuGfcGfgAfuCfcGfuAfgU |
| | cAfgAfsusu | | fgUfasusu |
| 6063 | AfsusCfgAfgCfgAfgAfgUfuCf | 6101 | usAfscAfgAfaCfuCfuCfgCfuC |
| | uGfuAfsusu | | fgAfususu |
| 6064 | CfsasAfgCfcGfcAfgUfuCfaCf | 6102 | usAfsaCfgUfgAfaCfuGfcGfgC |
| | gUfuAfsusu | | fuUfgsusu |
| 6065 | AfsasGfcCfgCfaGfuUfcAfcGf | 6103 | usAfsaAfcGfuGfaAfcUfgCfgG |
| | uUfuAfsusu | | fcUfususu |
| 6066 | AfsgsCfcGfcAfgUfuCfaCfgUf | 6104 | usUfsaAfaCfgUfgAfaCfuGfcG |
| | uUfaAfsusu | | fgCfususu |
| 6067 | GfsasCfaGfuCfaGfcUfuGfcGf | 6105 | usUfsuCfcGfcAfaGfcUfgAfcU |
| | gAfaAfsusu | | fgUfcsusu |
| 6068 | AfscsAfgUfcAfgCfuUfgCfgGf | 6106 | usAfsuUfcCfgCfaAfgCfuGfaC |
| | aAfuAfsusu | | fuGfususu |
| 6069 | CfsgsGfgCfuAfuGfaGfgUfaUf | 6107 | usAfscCfaUfaCfcUfcAfuAfgC |
| | gGfuAfsusu | | fcCfgsusu |
| 6070 | GfsgsGfcUfaUfgAfgGfuAfuGf | 6108 | usAfsaCfcAfuAfcCfuCfaUfaG |
| | gUfuAfsusu | | fcCfcsusu |
| 6071 | CfscsUfgAfaUfgGfuAfuGfuGf | 6109 | usCfsaCfcAfcAfuAfcCfaUfuC |
| | gUfgAfsusu | | faGfgsusu |
| 6072 | GfsusAfaUfgAfcAfcAfgUfcCf | 6110 | usUfsuAfgGfaCfuGfuGfuCfaU |
| | uAfaAfsusu | | fuAfcsusu |
| 6073 | UfsasAfuGfaCfaCfaGfuCfcUf | 6111 | usUfsuUfaGfgAfcUfgUfgUfcA |
| | aAfaAfsusu | | fuUfasusu |
| 6074 | CfsasCfaGfuCfcUfaAfaUfgUf | 6112 | usGfscCfaCfaUfuUfaGfgAfcU |
| | gGfcAfsusu | | fgUfgsusu |
| 6075 | CfsasGfuCfcUfaAfaUfgUfgGf | 6113 | usAfsgGfcCfaCfaUfuUfaGfgA |
| | cCfuAfsusu | | fcUfgsusu |
| 6076 | UfscsCfaAfcCfaGfgAfgUfgUf | 6114 | usGfsuUfaCfaCfuCfcUfgGfuU |
| | aAfcAfsusu | | fgGfasusu |
| 6077 | CfsasAfcCfaGfgAfgUfgUfaAf | 6115 | usAfsuGfuUfaCfaCfuCfcUfgG |
| | CAfuAfsusu | | fuUfgsusu |
| 6078 | CfscsAfgGfaGfuGfuAfaCfaUf | 6116 | usUfsuGfaUfgUfuAfcAfcUfcC |
| | cAfaAfsusu | | fuGfgsusu |
| 6079 | GfsasGfuGfuAfaCfaUfcAfaGf | 6117 | usGfsuGfcUfuGfaUfgUfuAfcA |
| | CAfcAfsusu | | fcUfcsusu |
| 6080 | UfsgsCfcUfgCfuUfuAfcCfcAf | 6118 | usUfsuGfuGfgGfuAfaAfgCfaG |
| | cAfaAfsusu | | fgCfasusu |
| 6081 | GfsgsUfcCfuGfgAfaGfgAfaUf | 6119 | usAfsuAfaUfuCfcUfuCfcAfgG |
| | uAfuAfsusu | | faCfcsusu |
| 6082 | UfsasUfaAfuCfcCfcAfaCfcGf | 6120 | usAfscUfcGfgUfuGfgGfgAfuU |
| | aGfuAfsusu | | faUfasusu |
| 6083 | UfscsUfuCfaCfgCfgUfgUfcUf | 6121 | usCfsaGfaGfaCfaCfgCfgUfgA |
| | cUfgAfsusu | | faGfasusu |
| 6084 | CfsasCfgCfgUfgUfcUfcUfgUf | 6122 | usAfsaCfaCfaGfaGfaCfaCfgC |
| | gUfuAfsusu | | fgUfgsusu |
| 6085 | AfsasCfuUfcUfuGfuCfaGfaCf | 6123 | usUfsaUfgUfcUfgAfcAfaGfaA |
| | aUfaAfsusu | | fgUfususu |
| 6086 | CfsusUfcUfuGfuCfaGfaCfaUf | 6124 | usUfsuUfaUfgUfcUfgAfcAfaG |
| | aAfaAfsusu | | faAfgsusu |

TABLE 10
Alternatively modified siRNA subset F sequences

| siRNA | SEQ ID | sense strand sequence | SEQ ID | antisense strand sequence |
|---|---|---|---|---|
| Name | NO: | (5′-3′) | NO: | (5′-3′) |
| ETD01274 | 6125 | asgscuggggCfaaguaauuua | 6087 | usAfsaAfuUfaCfuUfgCfcCfcA |
| | | susu | | fgCfususu |
| ETD01275 | 6126 | asasaaGfuuuAfAfugucacc | 6088 | usGfsgGfuGfaCfaUfuAfaAfcU |
| | | casusu | | fuUfususu |
| ETD01276 | 6127 | ususaauGfucAfcccaggggc | 6089 | usGfscCfcCfuGfgGfuGfaCfaU |
| | | asusu | | fuAfasusu |
| ETD01277 | 6128 | uscsaaguguCfcCfcaccaaa | 6090 | usUfsuUfgGfuGfgGfgAfcAfcU |
| | | asusu | | fuGfasusu |
| ETD01278 | 6129 | cscsacCfaaaCfCfuuccuaa | 6091 | usGfsuUfaGfgAfaGfgUfuUfgG |
| | | casusu | | fuGfgsusu |
| ETD01279 | 6130 | csasccaaaCfCfuUfccuaac | 6092 | usUfsgUfuAfgGfaAfgGfuUfuG |
| | | aasusu | | fgUfgsusu |
| ETD01280 | 6131 | cscscuuGfcAfAfcugaccua | 6093 | usAfsuAfgGfuCfaGfuUfgCfaA |
| | | uasusu | | fgGfgsusu |
| ETD01281 | 6132 | ususgcAfAfcuGfAfccuaug | 6094 | usCfscCfaUfaGfgUfcAfgUfuG |
| | | ggasusu | | fcAfasusu |
| ETD01282 | 6133 | usgscaAfcuGfAfccuauggg | 6095 | usUfscCfcAfuAfgGfuCfaGfuU |
| | | aasusu | | fgCfasusu |
| ETD01283 | 6134 | asasucccGfuAfgGfgacagg | 6096 | usAfscCfuGfuCfcCfuAfcGfgG |
| | | uasusu | | faUfususu |
| ETD01284 | 6135 | asascaauGfGfGfGfuugggu | 6097 | usGfsuAfcCfcAfaCfcCfcAfuU |
| | | acasusu | | fgUfususu |
| ETD01285 | 6136 | csgsacAfAfcuAfuugccgga | 6098 | usUfsuCfcGfgCfaAfuAfgUfuG |
| | | aasusu | | fuCfgsusu |
| ETD01286 | 6137 | gsascaacUfaUfUfgccggaa | 6099 | usAfsuUfcCfgGfcAfaUfaGfuU |
| | | uasusu | | fgUfcsusu |
| ETD01287 | 6138 | usascacuAfcGfGfauccgca | 6100 | usCfsuGfcGfgAfuCfcGfuAfgU |
| | | gasusu | | fgUfasusu |
| ETD01288 | 6139 | asuscgAfgcgAfgAfguucug | 6101 | usAfscAfgAfaCfuCfuCfgCfuC |
| | | uasusu | | fgAfususu |
| ETD01289 | 6140 | csasagccGfcAfGfuucacgu | 6102 | usAfsaCfgUfgAfaCfuGfcGfgC |
| | | uasusu | | fuUfgsusu |
| ETD01290 | 6141 | asasgccGfcAfGfuucacguu | 6103 | usAfsaAfcGfuGfaAfcUfgCfgG |
| | | uasusu | | fcUfususu |
| ETD01291 | 6142 | asgsccgCfagUfUfcacguuu | 6104 | usUfsaAfaCfgUfgAfaCfuGfcG |
| | | aasusu | | fgCfususu |
| ETD01292 | 6143 | gsascaGfucAfGfcuugcgga | 6105 | usUfsuCfcGfcAfaGfcUfgAfcU |
| | | aasusu | | fgUfcsusu |
| ETD01293 | 6144 | ascsagUfCfagCfuUfgcgga | 6106 | usAfsuUfcCfgCfaAfgCfuGfaC |
| | | auasusu | | fuGfususu |
| ETD01294 | 6145 | csgsggcuAfuGfaGfguaugg | 6107 | usAfscCfaUfaCfcUfcAfuAfgC |
| | | uasusu | | fcCfgsusu |
| ETD01295 | 6146 | gsgsgcuAfuGfAfGfGfuaug | 6108 | usAfsaCfcAfuAfcCfuCfaUfaG |
| | | guuasusu | | fcCfcsusu |
| ETD01296 | 6147 | cscsugAfAfuGfGfuAfugug | 6109 | usCfsaCfcAfcAfuAfcCfaUfuC |
| | | gugasusu | | faGfgsusu |
| ETD01297 | 6148 | gsusaaugAfcAfcAfguccua | 6110 | usUfsuAfgGfaCfuGfuGfuCfaU |
| | | aasusu | | fuAfcsusu |
| ETD01298 | 6149 | usasaugaCfaCfaguccuaaa | 6111 | usUfsuUfaGfgAfcUfgUfgUfcA |
| | | asusu | | fuUfasusu |
| ETD01299 | 6150 | csascagUfCfCfUfaaaugug | 6112 | usGfscCfaCfaUfuUfaGfgAfcU |
| | | gcasusu | | fgUfgsusu |
| ETD01300 | 6151 | csasguccuAfAfauguggccu | 6113 | usAfsgGfcCfaCfaUfuUfaGfgA |
| | | asusu | | fcUfgsusu |
| ETD01301 | 6152 | uscscaAfccAfGfGfAfgugu | 6114 | usGfsuUfaCfaCfuCfcUfgGfuU |
| | | aacasusu | | fgGfasusu |
| ETD01302 | 6153 | csasaccAfGfGfAfGfuguaa | 6115 | usAfsuGfuUfaCfaCfuCfcUfgG |
| | | cauasusu | | fuUfgsusu |
| ETD01303 | 6154 | cscsagGfaGfuGfuaacauca | 6116 | usUfsuGfaUfgUfuAfcAfcUfcC |
| | | aasusu | | fuGfgsusu |
| ETD01304 | 6155 | gsasgugUfaaCfaUfcaagca | 6117 | usGfsuGfcUfuGfaUfgUfuAfcA |
| | | casusu | | fcUfcsusu |
| ETD01305 | 6156 | usgsccUfgcUfUfuacccaca | 6118 | usUfsuGfuGfgGfuAfaAfgCfaG |
| | | aasusu | | fgCfasusu |
| ETD01306 | 6157 | gsgsuccuGfGfAfAfGfgaau | 6119 | usAfsuAfaUfuCfcUfuCfcAfgG |
| | | uauasusu | | faCfcsusu |
| ETD01307 | 6158 | usasuaauCfCfCfCfaaccga | 6120 | usAfscUfcGfgUfuGfgGfgAfuU |
| | | guasusu | | faUfasusu |
| ETD01308 | 6159 | uscsuuCfaCfgCfgugucucu | 6121 | usCfsaGfaGfaCfaCfgCfgUfgA |
| | | gasusu | | faGfasusu |
| ETD01309 | 6160 | csascgcgUfgUfcUfcugugu | 6122 | usAfsaCfaCfaGfaGfaCfaCfgC |
| | | uasusu | | fgUfgsusu |
| ETD01310 | 6161 | asascuucuuGfucagacauaa | 6123 | usUfsaUfgUfcUfgAfcAfaGfaA |
| | | susu | | fgUfususu |
| ETD01311 | 6162 | csusucUfUfgUfCfagacaua | 6124 | usUfsuUfaUfgUfcUfgAfcAfaG |
| | | aaasusu | | faAfgsusu |

[0310] Any siRNA among any of subsets A-H may comprise any modification pattern described herein. If a sequence is a different number of nucleotides in length than a modification pattern, the modification pattern may still be used with the appropriate number of additional nucleotides added 5′ or 3′ to match the number of nucleotides in the modification pattern. For example, if a sense or antisense strand of the siRNA among any of subsets A-F comprises 19 nucleotides, and a modification pattern comprises 21 nucleotides, UU may be added onto the 5′ end of the sense or antisense strand.

### Example 3: Screening MST1 siRNAs for Activity in Human Cells in Culture

[0311] Chemically modified MST1 siRNAs cross reactive for human and non-human primate and derived from sequences in siRNA subset F (Table 8) and shown in Table 10 were assayed for MST1 mRNA knockdown activity in cells in culture. Hep 3B2.1-7 cells (ATCC® HB-8064™) were seeded in 96-well tissue culture plates at a cell density of 7,500 cells per well in EMEM (ATCC Catalog No. 30-2003) supplemented with 10% fetal bovine serum and incubated overnight in a water-jacketed, humidified incubator at 37° C. in an atmosphere composed of air plus 5% carbon dioxide. The MST1 siRNAs were individually transfected into Hep 3B2.1-7 cells in duplicate wells at 10 nM final concentration using 0.15 μL Lipofectamine RNAiMax (Fisher) per well. Silencer Select Negative Control #1 (ThermoFisher, Catalog #4390843) was transfected at 10 nM final concentration as a control. Silencer Select human MST1 (ThermoFisher, Catalog #4427037, ID: s8994)) was transfected at 10 nM final concentration and used as a positive control. After incubation for 48 hours at 37° C., total RNA was harvested from each well and cDNA prepared using TaqMan® Fast Advanced Cells-to-CT™ Kit (ThermoFisher, Catalog #A35374) according to the manufacturer's instructions. The level of MST1 mRNA from each well was measured in triplicate by real-time qPCR on a QuantStudio™ 6 Pro Real-Time PCR System using TaqMan Gene Expression Assay for human MSTT (ThermoFisher, assay #Hs00360684_m1). The level of PPIA mRNA was measured using TaqMan Gene Expression Assay (ThermoFisher, assay #Hs99999904_m1) and used to determine relative MSTT mRNA levels in each well using the delta-delta Ct method. All data was normalized to relative MSTT mRNA levels in untreated Hep 3B2.1-7 cells. The results are shown in Table 11. The siRNAs ETD01290, ETD01274, ETD01298, ETD01299, ETD01296, ETD01297, ETD01281, ETD01303, ETD01308, ETD01289, ETD01302, ETD01305 and ETD01306 reduced MST1 levels by greater than 5000 when transfected at 10 nM.

TABLE 11
Knockdown Activity of MST1-Specific siRNAs
at 1 nM ad 10 nM in Human ARPE-19 Cells

| | Relative MST1 mRNA Level |
|---|---|
| siRNA name | 1.00 |

| Untreated Cells | 1 nM siRNA | 10 nM siRNA |
|---|---|---|
| Negative Control siRNA | 0.77 | 0.52 |
| Positive Control siRNA | 0.28 | 0.12 |
| ETD01274 | 0.46 | 0.47 |
| ETD01275 | 0.60 | 0.69 |
| ETD01276 | 0.91 | 0.70 |
| ETD01277 | 0.89 | 0.85 |
| ETD01278 | 1.04 | 0.84 |
| ETD01279 | 1.26 | 1.19 |
| ETD01280 | 0.76 | 0.79 |
| ETD01281 | 0.46 | 0.39 |
| ETD01282 | 0.63 | 0.69 |
| ETD01283 | 1.22 | 1.37 |
| ETD01284 | 1.11 | 0.98 |
| ETD01285 | 0.99 | 0.92 |
| ETD01286 | 0.95 | 0.65 |
| ETD01287 | 1.18 | 1.65 |
| ETD01288 | 0.79 | 0.75 |
| ETD01289 | 0.45 | 0.32 |
| ETD01290 | 0.40 | 0.50 |
| ETD01291 | 1.25 | 0.96 |
| ETD01292 | 0.96 | 0.81 |
| ETD01293 | 1.17 | 1.02 |
| ETD01294 | 0.91 | 0.76 |
| ETD01295 | 1.11 | 1.08 |
| ETD01296 | 0.69 | 0.43 |
| ETD01297 | 0.42 | 0.43 |
| ETD01298 | 0.39 | 0.45 |
| ETD01299 | 0.74 | 0.45 |
| ETD01300 | 1.23 | 0.90 |
| ETD01301 | 1.11 | 1.01 |
| ETD01302 | 0.75 | 0.31 |
| ETD01303 | 0.75 | 0.39 |
| ETD01304 | 1.16 | 0.88 |
| ETD01305 | 0.40 | 0.30 |
| ETD01306 | 0.27 | 0.20 |
| ETD01307 | 0.90 | 0.96 |
| ETD01308 | 0.39 | 0.37 |
| ETD01309 | 0.73 | 0.53 |
| ETD01310 | 0.78 | 0.65 |
| ETD01311 | 0.71 | 0.64 |

### Example 4: Determining the IC50 of MST1 siRNAs

[0312] The IC50 values for knockdown of MST1 mRNA by select MST1 siRNAs will be determined in Hep 3B2.1-7 cells (ATCC® HB-8064™) cells. The siRNAs will be assayed individually at 30 nM, 10 nM, 3 nM, 1 nM and 0.3 nM, or 3 nM, 1 nM, 0.3 nM, 0.1 nM and 0.03 nM, or 30 nM, 10 nM, 3 nM, 1 nM, 0.3 nM, 0.1 nM and 0.03 nM. The HepG2 cells will be seeded in 96-well tissue culture plates at a cell density of 7,500 cells per well in EMEM (ATCC Catalog No. 30-2003) supplemented with 10% fetal bovine serum and incubated overnight in a water-jacketed, humidified incubator at 37° C. in an atmosphere composed of air plus 5% carbon dioxide. The MST1 siRNAs will be individually transfected into HepG2 cells in triplicate wells using 0.15 μL Lipofectamine RNAiMax (Fisher) per well. After incubation for 48 hours at 37° C., total RNA will be harvested from each well and cDNA prepared using TaqMan® Fast Advanced Cells-to-C™ Kit (ThermoFisher, Catalog #A35374) according to the manufacturer's instructions. The level of MST1 mRNA from each well will be measured in triplicate by real-time qPCR on a QuantStudio™ 6 Pro Real-Time PCR System using TaqMan Gene Expression Assay for human MST1 (ThermoFisher, assay #Hs00360684_m1). The level of PPIA mRNA will be measured using TaqMan Gene Expression Assay (ThermoFisher, assay #Hs99999904_m1) and used to determine relative MST1 mRNA levels in each well using the delta-delta Ct method. All data will be normalized to relative MST1 mRNA levels in untreated HepG2 cells. Curve fit will be accomplish using the [inhibitor] vs. response (three parameters) function in GraphPad Prism software.

### Example 5: siRNA-Mediated Knockdown of MST1 in Hep 3B2.1-7 Cell Line

[0313] siRNAs targeting MST1 mRNA may downregulate levels of MST1 mRNA and MSP, leading to a decrease in MSP secretion, when administered to the cultured human hepatocyte cell line, Hep 3B2.1-7 cells (ATCC® HB-8064™). Accordingly, these results will demonstrate that siRNAs targeting MST1 mRNA in vivo will also downregulate levels of MST1 mRNA and MSP, leading to a decrease in MSP secretion into the bloodstream. The accompanying decrease in circulating MSP levels may improve lung conditions, particularly in subjects with lung disorders.

[0314] On Day 0, Hep 3B2.1-7 cells are to be seeded at 150,000 cells/mL into a Falcon 24-well tissue culture plate (ThermoFisher Cat. No. 353047) at 0.5 mL per well.

[0315] On Day 1, MST1 siRNA and negative control siRNA master mixes are prepared. The MST1 siRNA master mix contains 350 μL of Opti-MEM (ThermoFisher Cat. No. 4427037-s1288 Lot No. AS02B02D) and 3.5 μL of a mixture of the two MST1 siRNAs (10 μM stock). The negative control siRNA master mix contains 350 μL of Opti-MEM and 3.5 μL of negative control siRNA (ThermoFisher Cat. No. 4390843, 10 μM stock). Next, 3 μL of TransIT-X2 (Mirus Cat. No. MIR-6000) is added to each master mix. The mixes are incubated for 15 minutes to allow transfection complexes to form, then 51 μL of the appropriate master mix+TransIT-X2 is added to duplicate wells of HEPG2 cells with a final siRNA concentration of 10 nM.

[0316] On Day 3, 48 hours post transfection, media is collected and mixed with protein lysis buffer containing protease and phosphatase inhibitors, and the cells are lysed using the Cells-to-Ct kit according to the manufacturer's protocol (ThermoFisher Cat. No. 4399002). For the Cells-to-Ct, cells are washed with 50 μL using cold 1×PBS and lysed by adding 49.5 μL of Lysis Solution and 0.5 μL DNase I per well and pipetting up and down 5 times and incubating for 5 minutes at room temperature. The Stop Solution (5 μL/well) is added to each well and mixed by pipetting up and down five times and incubating at room temperature for 2 minutes. The reverse transcriptase reaction is performed using 22.5 μL of the lysate according to the manufacturer's protocol. Samples are stored at −80° C. until real-time qPCR is performed in triplicate using TaqMan Gene Expression Assays (Applied Biosystems FAM/MST1 using a BioRad CFX96 Cat. No. 1855195). For the protein quantification, equivalent quantities (30-50 μg) of protein are separated by 10% SDS polyacrylamide gels and transferred to polyvinylidene fluoride membranes. Membranes are blocked with 5% nonfat milk and incubated overnight with the appropriate primary antibody at dilutions specified by the manufacturer. Next, the membranes are washed three times in TBST and incubated with the corresponding horseradish peroxidase conjugated secondary antibody at 1:5000 dilution for 1 hr. Bound secondary antibody is detected using an enhanced chemiluminescence system. The primary immunoblotting antibody is an anti-MSP antibody (Abcam, Cambridge, UK).

[0317] A decrease in MST1 mRNA and MSP expression in the Hep 3B2.1-7 cells is expected after transfection with the MST1 siRNAs compared to MST1 mRNA and MSP levels in HEPG2 cells transfected with the non-specific control siRNA 48 hours after transfection. There is an expected decrease in the amount of MST1 mRNA and secreted MSP, measured by quantifying the amount of MST1 mRNA and MSP in media of Hep 3B2.1-7 cells transfected with the MST1 siRNAs relative to the amount of MST1 mRNA and MSP in media of Hep 3B2.1-7 cells transfected with a non-specific control siRNA 48 hours after transfection. These results are expected to show that the MST1 siRNAs elicit knockdown of MST1 mRNA in Hep 3B2.1-7 cells and that the decrease in MST1 expression may correspond with a decrease in MST1 mRNA and MSP secretion.

### Example 6: ASO-Mediated Knockdown of MST1 in Hep 3B2.1-7 Cell Line

[0318] ASOs targeting MST1 mRNA may downregulate levels of MST1 mRNA and MSP, leading to a decrease in MSP secretion, when administered to the cultured human hepatocyte cell line, Hep 3B2.1-7. Accordingly, these results will demonstrate that siRNAs targeting MST1 mRNA in vivo will also downregulate levels of MST1 mRNA and MSP, leading to a decrease in MSP secretion into the bloodstream. The accompanying decrease in circulating MSP levels may improve lung conditions, particularly in subjects with lung disorders.

[0319] On Day 0, Hep 3B2.1-7 cells are to be seeded at 150,000 cells/mL into a Falcon 24-well tissue culture plate (ThermoFisher Cat. No. 353047) at 0.5 mL per well.

[0320] On Day 1, MST1 ASO and negative control ASO master mixes are prepared. The MST1 ASO master mix contains 350 μL of Opti-MEM (ThermoFisher Cat. No. 4427037-s1288 Lot No. AS02B02D) and 3.5 μL of a mixture of the two MST1 ASOs (10 μM stock). The negative control ASO master mix contains 350 μL of Opti-MEM and 3.5 μL of negative control ASO (ThermoFisher Cat. No. 4390843, 10 μM stock). Next, 3 μL of TransIT-X2 (Mirus Cat. No. MIR-6000) is added to each master mix. The mixes are incubated for 15 minutes to allow transfection complexes to form, then 51 μL of the appropriate master mix+TransIT-X2 is added to duplicate wells of HEPG2 cells with a final ASO concentration of 10 nM.

[0321] On Day 3, 48 hours post transfection, media is collected and mixed with protein lysis buffer containing protease and phosphatase inhibitors, and the cells are lysed using the Cells-to-Ct kit according to the manufacturer's protocol (ThermoFisher Cat. No. 4399002). For the Cells-to-Ct, cells are washed with 50 μL using cold 1×PBS and lysed by adding 49.5 μL of Lysis Solution and 0.5 μL DNase I per well and pipetting up and down 5 times and incubating for 5 minutes at room temperature. The Stop Solution (5 μL/well) is added to each well and mixed by pipetting up and down five times and incubating at room temperature for 2 minutes. The reverse transcriptase reaction is performed using 22.5 μL of the lysate according to the manufacturer's protocol. Samples are stored at −80° C. until real-time qPCR is performed in triplicate using TaqMan Gene Expression Assays (Applied Biosystems FAM/MST1 using a BioRad CFX96 Cat. No. 1855195). For the protein quantification, equivalent quantities (30-50 μg) of protein are separated by 10% SDS polyacrylamide gels and transferred to polyvinylidene fluoride membranes. Membranes are blocked with 5% nonfat milk and incubated overnight with the appropriate primary antibody at dilutions specified by the manufacturer. Next, the membranes are washed three times in TBST and incubated with the corresponding horseradish peroxidase conjugated secondary antibody at 1:5000 dilution for 1 hr. Bound secondary antibody is detected using an enhanced chemiluminescence system. The primary immunoblotting antibody is an anti-MSP antibody (Abcam, Cambridge, UK).

[0322] A decrease in MST1 mRNA and MSP expression in the Hep 3B2.1-7 cells is expected after transfection with the MST1 ASOs compared to MST1 mRNA levels in Hep 3B2.1-7 cells transfected with the non-specific control ASO 48 hours after transfection. There is an expected decrease in the amount of MST1 mRNA and secreted MSP, measured by quantifying the amount of MST1 mRNA and MSP in media of Hep 3B2.1-7 cells transfected with the MST1 ASOs relative to the amount of MST1 mRNA and MSP in media of Hep 3B2.1-7 cells transfected with a non-specific control ASO 48 hours after transfection. These results are expected to show that the MST1 ASOs elicit knockdown of MST1 mRNA and MSP in HEPG2 cells and that the decrease in MST1 expression may correspond with a decrease in MST1 mRNA and MSP secretion.

### Example 7: Inhibition of MST1 in a Mouse Model of Lung Inflammation Via Acute Cigarette Smoke Exposure Using MST1 siRNAs or ASOs

[0323] In this experiment, a mouse model of lung inflammation induced by acute cigarette smoke exposure is used to evaluate the effect of siRNA or ASO inhibition of MST1. In this cigarette smoke induced model, mice are exposed to cigarette smoke for 3 hours which will result in a transient inflammatory response. Lung inflammation is assessed by measuring neutrophils and macrophages in bronchoalveolar lavage fluid and lung tissue.

[0324] Briefly, mice are divided into six groups: Group 1—a group treated with non-targeting control siRNA and cigarette smoke inhalation, Group 2—a group treated with non-targeting control ASO and cigarette smoke inhalation, Group 3—a group treated with MST1 siRNA1 and cigarette smoke inhalation, Group 4—a group treated with MST1 ASO1 and cigarette smoke inhalation, Group 5—a group treated with vehicle and cigarette smoke inhalation, Group 6—a group treated with vehicle and not receiving cigarette smoke stimulus. Each group contains eight mice (4 males, 4 females).

[0325] Administration of siRNA or ASO is achieved with a 200 μL subcutaneous injection of siRNA or ASO resuspended in PBS at concentration of 10 μM. At Time 0, Group 1 mice are injected subcutaneously with non-targeting control siRNA, Group 2 mice are injected subcutaneously with non-targeting control ASO, Group 3 mice are injected subcutaneously with siRNA1 targeting mouse MST1, Group 4 mice are injected subcutaneously with ASO1 targeting mouse MST1, and Group 5 and 6 mice are injected subcutaneously with vehicle.

[0326] 24 hours after the smoke inhalation treatment, bronchoalveolar lavage fluid is collected and the mice are sacrificed by cervical dislocation following an intraperitoneal injection of 0.3 ml Nembutal (5 mg/ml) (Sigma Cat. No. 1507002). Final blood samples are collected, and livers and lungs are removed, and a section placed in RNAlater for mRNA isolation.

[0327] mRNA is isolated from tissue placed in RNAlater solution using the PureLink kit according to the manufacturer's protocol (ThermoFisher Cat. No. 12183020). The reverse transcriptase reaction is performed according to the manufacturer's protocol. Samples are stored at −80° C. until real-time qPCR is performed in triplicate using TaqMan Gene Expression Assays (Applied Biosystems FAM/MST1 using a BioRad CFX96 Cat. No. 1855195). A decrease in MST1 mRNA and MSP expression in the liver tissue and circulating MSP in the blood from mice dosed with the MST1 siRNA1 or ASO1 is expected compared to MST1 mRNA or MSP expression in the liver tissue and circulating MSP in the blood from mice dosed with the non-specific controls. There is an expected decrease in neutrophil and macrophage counts in the bronchoalveolar lavage fluid in cigarette smoke exposed mice that receive the MST1 siRNA or ASO compared to the neutrophil and macrophage counts in the bronchoalveolar lavage fluid in cigarette smoke exposed mice that receive the non-specific control. These results are expected to show that the MST1 siRNA or ASO elicits knockdown of MST1 mRNA and MSP in liver tissue and reduces circulating MSP, and that the decrease in MST1 mRNA and MSP expression may correspond with a decrease in neutrophil and macrophage counts in the bronchoalveolar lavage fluid in mice exposed to cigarette smoke.

### Example 8: Inhibition of MST1 in a Mouse Model of COPD Using MST1 siRNAs or ASOs

[0328] In this experiment, a mouse model of cigarette smoke induced COPD is to be used to evaluate the effect of siRNA or ASO inhibition of MST1. In the cigarette smoke induced COPD model, mice are exposed to cigarette smoke for 6 months to mimic patients with a substantial history of cigarette smoking. Lung inflammation is assessed by measuring neutrophil and macrophage in bronchoalveolar lavage fluid and lung tissue. Lung function is also assessed by measuring tidal volume, resistance and dynamic compliance. Additionally, lung morphology and air space enlargement is assessed by fixing and staining the lungs and measuring structural parameters such as air space, septal wall thickness and mean linear intercept.

[0329] Briefly, mice are divided into six groups: Group 1—a group treated with non-targeting control siRNA and cigarette smoke inhalation, Group 2—a group treated with non-targeting control ASO and cigarette smoke inhalation, Group 3—a group treated with MST1 siRNA1 and cigarette smoke inhalation, Group 4—a group treated with MST1 ASO1 and cigarette smoke inhalation, Group 5—a group treated with vehicle and cigarette smoke inhalation, Group 6—a group treated with vehicle and not receiving cigarette smoke stimulus. Each group contains eight mice (4 males, 4 females).

[0330] Administration of siRNA or ASO is achieved with a 200 μL subcutaneous injection of siRNA or ASO resuspended in PBS at concentration of 10 μM. On Study Day 0, Group 1 mice are injected subcutaneously with non-targeting control siRNA, Group 2 mice are injected subcutaneously with non-targeting control ASO, Group 3 mice are injected subcutaneously with siRNA1 targeting mouse MST1, Group 4 mice are injected subcutaneously with ASO1 targeting mouse MST1, and Group 5 and 6 mice are injected subcutaneously with vehicle. Every 14 days after the first injection animals from each group will be dosed for a total of 12 injections.

[0331] 24 hours after the final smoke inhalation treatment, bronchoalveolar lavage fluid is collected and the mice are sacrificed by cervical dislocation following an intraperitoneal injection of 0.3 ml Nembutal (5 mg/ml) (Sigma Cat. No. 1507002). Final blood samples are collected, and livers and lungs are removed, and a section placed in RNAlater for mRNA isolation or fixed with paraformaldehyde and then embedded in paraffin for tissue sectioning.

[0332] mRNA is isolated from tissue placed in RNAlater solution using the PureLink kit according to the manufacturer's protocol (ThermoFisher Cat. No. 12183020). The reverse transcriptase reaction is performed according to the manufacturer's protocol. Samples are stored at −80° C. until real-time qPCR is performed in triplicate using TaqMan Gene Expression Assays (Applied Biosystems FAM/MST1 using a BioRad CFX96 Cat. No. 1855195). A decrease in MST1 mRNA and MSP expression in the liver tissue and circulating MSP in the blood from mice dosed with the MST1 siRNA1 or ASO1 is expected compared to MST1 mRNA and MSP expression in the liver tissue and circulating MSP in the blood from mice dosed with the non-specific controls. There is an expected decrease in neutrophil and macrophage counts in the bronchoalveolar lavage fluid in cigarette smoke exposed mice that receive the MST1 siRNA or ASO compared to the neutrophil and macrophage counts in the bronchoalveolar lavage fluid in cigarette smoke exposed mice that receive the non-specific control. There is also an expected decrease in air space and mean linear intercept and an increase in septal wall thickness in cigarette smoke exposed mice that receive the MST1 siRNA or ASO compared to the air space, mean linear intercept and septal wall thickness in cigarette smoke exposed mice that receive the non-specific control. Additionally, there is also an expected decrease in compliance and tidal volume and an increase in resistance in cigarette smoke exposed mice that receive the MST1 siRNA or ASO compared to the compliance, tidal volume and resistance in cigarette smoke exposed mice that receive the non-specific control. These results will show that an MST1 siRNA or ASO may elicit knockdown of MST1 mRNA and MSP in liver tissue and reduce circulating MSP, and that the decrease in MST1 mRNA and MSP expression may correspond with a decrease in neutrophil and macrophage counts in the bronchoalveolar lavage fluid and increased lung function and decreased pathology in mice exposed to cigarette smoke.

### Example 9: Screening siRNAs Targeting Human MST1 mRNA in Mice Transfected with AAV8-TBG-h-MST1

[0333] Several siRNAs targeting human MST1 mRNA were tested for activity in mice following transfection with an adeno-associated viral vector. The siRNAs were attached to the GalNAc ligand ETL1 followed by a phosphorothioate linkage at the 5′ end of the sense strand. The siRNAs used in this Example are included in Table 24A.

[0334] Six to eight week old female mice (C57Bl/6) were injected with 10 uL of a recombinant adeno-associated virus 8 (AAV8) vector (1.5×10E13 genome copies/mL) by the retroorbital route. The recombinant AAV8 contained the open reading frame and the majority of the 3′UTR of the human MST1 mRNA sequence (NM 020998.4) under the control of the human thyroxine binding globulin promoter in an AAV2 backbone packaged in AAV8 capsid (AAV8-TBG-h-MST1). On Day 14 after infection, serum was collected and the level of human MSP protein in each mouse was measured using the Human MSP/MST1/Macrophage Stimulating Protein ELISA Kit PicoKine™ from Boster Bio (Catalog #EK0814) according to the manufacturer's instructions using a serum sample dilution of 1:25 in PBS. Recombinant MSP included in the kit was used to generate a standard curve of 10,000 μg/mL to 0 μg/mL MSP. The optical density of the plate was read at 450 nm using a PerkinElmer Envision multimode plate reader. The concentration of MSP in each mouse serum sample was calculated from the standard curve by interpolation using least squares fit (Prism version 9, Software MacKiev).

[0335] Mice were allocated into groups (n=3) such that the groups had similar serum levels of human MSP and then given a subcutaneous injection of a single 100 ug dose of a GalNAc-conjugated siRNA or PBS as vehicle control. On Days 0, 4 and 13 after injection, serum was collected to assess serum MSP concentrations by ELISA using the methods described above. The MSP serum concentration at each timepoint was made relative to the level of MSP in the Day 0 sample for each individual mouse. The results are shown in Table 12. Mice injected with ETD01723 had the greatest reduction in serum MSP of the siRNAs tested, with lower levels on Day 13 than on Day 4 relative to Day 0. Mice injected with ETD01728, ETD01725 and ETD01729 also showed substantial reduction of serum MSP. Note that ETD01724 did not have its target sequence in the AAV8-TBG-h-MST1 construct and therefore functioned as a negative control siRNA in this study.

[0336] Mice were sacrificed on Day 13 and a liver sample from each was collected and placed in RNAlater (ThermoFisher Catalog #AM7020) until processing. Total liver RNA was prepared by homogenizing the liver tissue in homogenization buffer (Maxwell RSC simplyRNA Tissue Kit) using a Percellys 24 tissue homogenizer (Bertin Instruments) set at 5000 rpm for two 10 second cycles. Total RNA from the lysate was purified on a Maxwell RSC 48 platform (Promega Corporation) according to the manufacturer's recommendations. Preparation of cDNA was performed using Quanta qScript cDNA SuperMix (VWR, Catalog #95048-500) according to the manufacturer's instructions. The relative levels of liver MST1 mRNA were assessed by RT-qPCR in triplicate on a QuantStudio™ 6 Pro Real-Time PCR System using TaqMan assays for human MST1 (ThermoFisher, assay #Hs00360684 ml) and the mouse housekeeping gene PPIA (ThermoFisher, assay #Mm02342430_g1) and PerfeCTa® qPCR FastMix®, Low ROX™ (VWR, Catalog #101419-222). Data were normalized to the level in animals receiving PBS. Results are shown in Table 13. Mice injected with ETD01723, ETD01728, ETD01725, ETD01729 and ETD01731 had substantially lower levels in mean liver human MST1 mRNA on Day 13 relative to mice receiving PBS.

TABLE 12
Relative Mean Serum Human MSP
Levels in AAV8-TBG-h-MST1 Mice

| | | | | Mean serum human MSP | | |
|---|---|---|---|---|---|---|
| | | | Dose | (Relativeto Day 0) | | |
| Group | n | Treatment | (ug) | Day 0 | Day 4 | Day 13 |
| 1 | 3 | PBS | | 1.00 | 0.94 | 0.66 |
| 2 | 3 | ETD01723 | 100 | 1.00 | 0.19 | 0.05 |
| 3 | 3 | ETD01724 | 100 | 1.00 | 1.15 | 0.79 |
| 4 | 3 | ETD01725 | 100 | 1.00 | 0.43 | 0.21 |
| 5 | 3 | ETD01726 | 100 | 1.00 | 0.92 | 0.83 |
| 6 | 3 | ETD01727 | 100 | 1.00 | 1.25 | 1.04 |
| 7 | 3 | ETD01728 | 100 | 1.00 | 0.15 | 0.13 |
| 8 | 3 | ETD01729 | 100 | 1.00 | 0.47 | 0.45 |
| 9 | 3 | ETD01731 | 100 | 1.00 | 1.55 | 0.75 |
| 10 | 3 | ETD01732 | 100 | 1.00 | 1.45 | 1.05 |
| 11 | 3 | ETD01733 | 100 | 1.00 | 1.26 | 1.26 |
| 12 | 3 | ETD01734 | 100 | 1.00 | 1.19 | 0.82 |

TABLE 13
Relative Human MST1 mRNA Levels
in Livers of AAV8-TBG-h-MST1 Mice

| | | | Dose | Mean human MST1 mRNA |
|---|---|---|---|---|
| Group | n | Treatment | (ug) | (Relative to Group 1, Day 13) |
| 1 | 3 | PBS | | 1.00 |
| 2 | 3 | ETD01723 | 100 | 0.15 |
| 3 | 3 | ETD01724 | 100 | 2.25 |
| 4 | 3 | ETD01725 | 100 | 0.31 |
| 5 | 3 | ETD01726 | 100 | 2.78 |
| 6 | 3 | ETD01727 | 100 | 2.78 |
| 7 | 3 | ETD01728 | 100 | 0.08 |
| 8 | 3 | ETD01729 | 100 | 0.01 |
| 9 | 3 | ETD01731 | 100 | 0.35 |
| 10 | 3 | ETD01732 | 100 | 0.97 |
| 11 | 3 | ETD01733 | 100 | 3.10 |
| 12 | 3 | ETD01734 | 100 | 0.92 |

### Example 10: Screening of Additional siRNAs Targeting Human MST-1 mRNA in Mice Transfected with AAV8-TBG-h-MST1 and Confirmation of the Activity of ETD01723, ETD01725, ETD01728 and ETD01729

[0337] Additional siRNAs targeting human MST1 mRNA (ETD01795, ETD01798, ETD01799, ETD01800) were tested for activity in mice following transfection with an adeno-associated viral vector. The siRNAs were attached to the GalNAc ligand ETL17 followed by a phosphorothioate linkage at the 5′ end of the sense strand. Confirmation of the activities of ETD01723, ETD01725, ETD01728 and ETD01729 from the Example above was also performed. The siRNAs used in this Example are included in Table 24A.

[0338] Six to eight week old female mice (C57Bl/6) were injected with 10 uL of a recombinant adeno-associated virus 8 (AAV8) vector (1.5×10E13 genome copies/mL) by the retroorbital route. The recombinant AAV8 contained the open reading frame and the majority of the 3′UTR of the human MST1 sequence (NM 020998.4) under the control of the human thyroxine binding globulin promoter in an AAV2 backbone packaged in AAV8 capsid (AAV8-TBG-h-MST1). On Day 14 after infection, serum was collected and the level of human MSP in each mouse was measured using the Human MSP/MST1 DuoSet ELISA from R&D (Catalog #DY352). The manufacturer's instructions regarding all reagent preparations for buffers and solutions was followed. A serum sample dilution of 1:250 was utilized for all test samples. Recombinant MSP included in the kit was used to create a standard curve of 10,000 μg/mL to 0 μg/mL. The optical density of the plate was read at 450 nm using a PerkinElmer Envision multimode plate reader. The concentration of MSP in each mouse serum sample was calculated from the standard curve by interpolation using least squares fit (Prism version 9, Software MacKiev).

[0339] Mice were allocated into groups (n=3) such that the groups had similar serum levels of human MSP and then given a subcutaneous injection of a single 100 ug dose of a GalNAc-conjugated siRNA or PBS as vehicle control. On Days 0, 4 and 10 after injection, serum was collected to assess serum MSP concentrations by ELISA using the methods described above. The MSP serum concentration at each timepoint was made relative to the level of MSP in the Day 0 sample for each individual mouse. The results are shown in Table 14. Mice injected with ETD1799 or ETD01800 had the greatest reduction in serum MSP of the additional siRNAs tested, with lower levels on Day 10 than on Day 4 relative to Day 0. The activities of ETD01723, ETD01725, ETD01728 and ETD01729 was confirmed with treatment of mice with ETD01723 and ETD01728 yielding the greatest reduction in serum MSP. Of the additional siRNA targeting MST1 mRNA (ETD01795, ETD01798, ETD01799, ETD01800), ETD01799 and ETD01800 gave the largest reduction in serum MSP. Replacement of the ETL1 ligand on ETD01723 with the ETL17 ligand on the same sequence (ETD01823) resulted in a greater reduction in MSP.

[0340] Mice were sacrificed on Day 10 and a liver sample from each was collected and placed in RNAlater (ThermoFisher Cat #AM7020) until processing. Total liver RNA was prepared by homogenizing the liver tissue in homogenization buffer (Maxwell RSC simplyRNA Tissue Kit) using a Percellys 24 tissue homogenizer (Bertin Instruments) set at 5000 rpm for two 10 second cycles. Total RNA from the lysate was purified on a Maxwell RSC 48 platform (Promega Corporation) according to the manufacturer's recommendations. Preparation of cDNA was performed using Quanta qScript cDNA SuperMix (VWR, Catalog #95048-500) according to the manufacturer's instructions. The relative levels of liver MST1 mRNA were assessed by RT-qPCR in triplicate on a QuantStudio™ 6 Pro Real-Time PCR System using TaqMan assays for human MST1 (ThermoFisher, assay #Hs00360684 ml) and the mouse housekeeping gene PPIA (ThermoFisher, assay #Mm02342430_g1) and PerfeCTa® qPCR FastMix®, Low ROX™ (VWR, Catalog #101419-222). Data were normalized to the level in animals receiving PBS. Results are shown in Table 15. Mice receiving siRNAs targeting MST1 had substantially lower levels in mean liver human MST1 mRNA on Day 10 relative to mice receiving PBS. The activities of ETD01723, ETD01725, ETD01728 and ETD01729 was confirmed with treatment of mice with ETD01723 and ETD01728 yielding the greatest reduction in liver MST1 mRNA. Of the additional siRNA targeting MST1 mRNA (ETD01795, ETD01798, ETD01799, ETD01800), ETD01799 and ETD01800 gave the largest reduction in in liver MST1 mRNA.

TABLE 14
Relative Mean Serum Human MSP
Levels in AAV8-TBG-h-MST1 Mice

| | | | | Mean serum human MSP | | |
|---|---|---|---|---|---|---|
| | | | Dose | (Relativeto Day 0) | | |
| Group | n | Treatment | (ug) | Day 0 | Day 4 | Day 10 |
| 1 | 3 | PBS | | 1.00 | 2.58 | 1.33 |
| 2 | 3 | ETD01723 | 100 | 1.00 | 0.34 | 0.18 |
| 3 | 3 | ETD01823 | 100 | 1.00 | 0.41 | 0.13 |
| 4 | 3 | ETD01725 | 100 | 1.00 | 1.22 | 0.61 |
| 5 | 3 | ETD01728 | 100 | 1.00 | 0.30 | 0.12 |
| 6 | 3 | ETD01729 | 100 | 1.00 | 0.37 | 0.36 |
| 7 | 3 | ETD01795 | 100 | 1.00 | 1.18 | 0.53 |
| 8 | 3 | ETD01798 | 100 | 1.00 | 0.96 | 0.65 |
| 9 | 3 | ETD01799 | 100 | 1.00 | 0.26 | 0.17 |
| 10 | 3 | ETD01800 | 100 | 1.00 | 0.48 | 0.18 |

TABLE 15
Relative Human MST1 mRNA Levels
in Livers of AAV8-TBG-h-MST1 Mice

| | | | Dose | Mean human MST1 mRNA |
|---|---|---|---|---|
| Group | n | Treatment | (ug) | (Relative to Group 1, Day 10) |
| 1 | 3 | PBS | | 1.00 |
| 2 | 3 | ETD01723 | 100 | 0.05 |
| 3 | 3 | ETD01823 | 100 | 0.07 |
| 4 | 3 | ETD01725 | 100 | 0.21 |
| 5 | 3 | ETD01728 | 100 | 0.19 |
| 6 | 3 | ETD01729 | 100 | 0.28 |
| 7 | 3 | ETD01795 | 100 | 0.28 |
| 8 | 3 | ETD01798 | 100 | 0.25 |
| 9 | 3 | ETD01799 | 100 | 0.02 |
| 10 | 3 | ETD01800 | 100 | 0.03 |

### Example 11: Screening of Additional siRNAs Targeting Human MST-1 in Mice Transfected with AAV8-TBG-h-MST1 and Testing the Activity of siRNAs Containing Alternative Modification Patterns of ETD01723 and ETD01728

[0341] Additional siRNAs targeting human MST1 mRNA (ETD01789 and ETD01794) were tested for activity in mice following transfection with an adeno-associated viral vector. The siRNAs were attached to the GalNAc ligand ETL1 followed by a phosphorothioate linkage at the 5′ end of the sense strand. The activities of siRNAs with alternative modification patterns of ETD01723 (ETD01827-ETD01831) and ETD01728 (ETD01832-ETD01837) were also assessed. The siRNAs were attached to the GalNAc ligand ETL17 followed by a phosphorothioate linkage at the 5′ end of the sense strand. The activities of ETD01827-ETD01831 were compared to ETD01823 which had the identical sequence and modification pattern to ETD01723 but attached to ETL17. The activities of ETD01832-ETD01837 were compared to ETD01821 which had the identical sequence and modification pattern to ETD01728 but attached to ETL17. The siRNAs used in this Example are included in Table 24A.

[0342] Six to eight week old female mice (C57Bl/6) were injected with 10 uL of a recombinant adeno-associated virus 8 (AAV8) vector (2.4×10E13 genome copies/mL) by the retroorbital route. The recombinant AAV8 contained the open reading frame and the majority of the 3′UTR of the human MST1 sequence (NM 020998.4) under the control of the human thyroxine binding globulin promoter in an AAV2 backbone packaged in AAV8 capsid (AAV8-TBG-h-MST1). On Day 13 after infection, serum was collected and the level of human MSP in each mouse was measured using the Human MSP/MST1 DuoSet ELISA from R&D (Catalog #DY352). The manufacturer's instructions regarding all reagent preparations for buffers and solutions was followed. A serum sample dilution of 1:250 was utilized for all test samples. Recombinant MSP included in the kit was used to create a standard curve of 10,000 μg/mL to 0 μg/mL. The optical density of the plate was read at 450 nm using a PerkinElmer Envision multimode plate reader. The concentration of MSP in each mouse serum sample was calculated from the standard curve by interpolation using least squares fit (Prism version 9, Software MacKiev).

[0343] Mice were allocated into groups (n=3) such that the groups had similar serum levels of human MSP and then given a subcutaneous injection of a single 60 ug dose of a GalNAc-conjugated siRNA or PBS as vehicle control. On Days 0 and 11 after injection, serum was collected to assess serum MSP concentrations by ELISA using the methods described above. The MSP serum concentration at each timepoint was made relative to the level of MSP protein in the Day 0 sample for each individual mouse. The results are shown in Table 16. Mice injected with ETD01789 or ETD01794 did not have greater reductions in serum MSP than ETD01823 or ETD01821 on Day 11. The activities of siRNAs with alternative modification patterns of ETD01723 and ETD01823, namely ETD01824-ETD01831 were comparable to ETD01823, with ETD01828 and ETD01831 showing the greatest level serum MSP reduction on Day 11. The activities of siRNAs with alternative modification patterns of ETD01728 and ETD01821, namely ETD01832-ETD01837 were comparable to ETD01823, with ETD01834, ETD01835 and ETD01836 showing the greatest level serum MSP reduction on Day 11.

[0344] Mice were sacrificed on Day 11 and a liver sample from each was collected and placed in RNAlater (ThermoFisher Cat #AM7020) until processing. Total liver RNA was prepared by homogenizing the liver tissue in homogenization buffer (Maxwell RSC simplyRNA Tissue Kit) using a Percellys 24 tissue homogenizer (Bertin Instruments) set at 5000 rpm for two 10 second cycles. Total RNA from the lysate was purified on a Maxwell RSC 48 platform (Promega Corporation) according to the manufacturer's recommendations. Preparation of cDNA was performed using Quanta qScript cDNA SuperMix (VWR, Catalog #95048-500) according to the manufacturer's instructions. The relative levels of liver MST1 mRNA were assessed by RT-qPCR in triplicate on a QuantStudio™ 6 Pro Real-Time PCR System using TaqMan assays for human MST1 (ThermoFisher, assay #Hs00360684 ml) and the mouse housekeeping gene PPIA (ThermoFisher, assay #Mm02342430_g1) and PerfeCTa® qPCR FastMix®, Low ROX™ (VWR, Catalog #101419-222). Data were normalized to the level in animals receiving PBS. Results are shown in Table 17. Mice injected with ETD01789 or ETD01794 did not have greater reductions in liver MST1 mRNA than ETD01823 or ETD01821 on Day 11. The mRNA reduction activities of mice receiving siRNAs with alternative modification patterns of ETD01723 and ETD01823, namely ETD01824-ETD011831, were comparable to ETD01823 relative to mice receiving PBS. The activities of siRNAs with alternative modification patterns of ETD01728 and ETD01821, namely ETD01832-ETD011837, were comparable to ETD01821.

TABLE 16
Relative Mean Serum Human MSP
Levels in AAV8-TBG-h-MST1 Mice

| | | | | Mean serum human MSP | |
|---|---|---|---|---|---|
| | | | Dose | (Relative to Day 0) | |
| Group | n | Treatment | (ug) | Day 0 | Day 11 |
| 1 | 3 | PBS | | 1.00 | 0.79 |
| 2 | 3 | ETD01823 | 60 | 1.00 | 0.08 |
| 3 | 3 | ETD01827 | 60 | 1.00 | 0.14 |
| 4 | 3 | ETD01828 | 60 | 1.00 | 0.05 |
| 5 | 3 | ETD01829 | 60 | 1.00 | 0.16 |
| 6 | 3 | ETD01830 | 60 | 1.00 | 0.12 |
| 7 | 3 | ETD01831 | 60 | 1.00 | 0.10 |
| 8 | 3 | ETD01821 | 60 | 1.00 | 0.06 |
| 9 | 3 | ETD01832 | 60 | 1.00 | 0.07 |
| 10 | 3 | ETD01833 | 60 | 1.00 | 0.06 |
| 11 | 3 | ETD01834 | 60 | 1.00 | 0.04 |
| 12 | 3 | ETD01835 | 60 | 1.00 | 0.01 |
| 13 | 3 | ETD01836 | 60 | 1.00 | 0.04 |
| 14 | 3 | ETD01837 | 60 | 1.00 | 0.17 |
| 15 | 3 | ETD01789 | 60 | 1.00 | 0.26 |
| 16 | 3 | ETD01794 | 60 | 1.00 | 1.51 |

TABLE 17
Relative Human MST1 mRNA Levels
in Livers of AAV8-TBG-h-MST1 Mice

| | | | Dose | Mean human MST1 m RNA |
|---|---|---|---|---|
| Group | n | Treatment | (ug) | (Relative to Group 1, Day 11) |
| 1 | 3 | PBS | | 1.00 |
| 2 | 3 | ETD01823 | 60 | 0.13 |
| 3 | 3 | ETD01827 | 60 | 0.30 |
| 4 | 3 | ETD01828 | 60 | 0.13 |
| 5 | 3 | ETD01829 | 60 | 0.23 |
| 6 | 3 | ETD01830 | 60 | 0.12 |
| 7 | 3 | ETD01831 | 60 | 0.24 |
| 8 | 3 | ETD01821 | 60 | 0.17 |
| 9 | 3 | ETD01832 | 60 | 0.10 |
| 10 | 3 | ETD01833 | 60 | 0.23 |
| 11 | 3 | ETD01834 | 60 | 0.16 |
| 12 | 3 | ETD01835 | 60 | 0.23 |
| 13 | 3 | ETD01836 | 60 | 0.18 |
| 14 | 3 | ETD01837 | 60 | 0.19 |
| 15 | 3 | ETD01789 | 60 | 0.80 |
| 16 | 3 | ETD01794 | 60 | 0.91 |

### Example 12: Screening of Additional siRNAs Targeting Human MST1 in Mice Transfected with AAV8-TBG-h-MST1

[0345] Additional siRNAs targeting human MST1, namely ETD1860-ETD01868, were tested for activity in mice following transfection with an adeno-associated viral vector. The siRNAs were attached to the GalNAc ligand ETL17 followed by a phosphorothioate linkage at the 5′ end of the sense strand. The siRNAs ETD01823 and ETD01800 were included as positive controls. The siRNAs used in this Example are included in Table 24A.

[0346] Six to eight week old female mice (C57Bl/6) were injected with 10 uL of a recombinant adeno-associated virus 8 (AAV8) vector (2.4×10E13 genome copies/mL) by the retroorbital route. The recombinant AAV8 contained the open reading frame and the majority of the 3′UTR of the human MST1 sequence (NM 020998.4) under the control of the human thyroxine binding globulin promoter in an AAV2 backbone packaged in AAV8 capsid (AAV8-TBG-h-MST1). On Day 14 after infection, serum was collected and the level of human MSP in each mouse was measured using the Human MSP/MST1 DuoSet ELISA from R&D (Catalog #DY352). The manufacturer's instructions regarding all reagent preparations for buffers and solutions were followed. A serum sample dilution of 1: 50 was utilized for all test samples. Recombinant MSP included in the kit was used to create a standard curve of 10,000 μg/mL to 0 μg/mL. The optical density of the plate was read at 450 nm using a PerkinElmer Envision multimode plate reader. The concentration of MSP in each mouse serum sample was calculated from the standard curve by interpolation using least squares fit (Prism version 9, Software MacKiev).

[0347] Mice were allocated into groups (n=3) such that the groups had similar serum levels of MSP and then given a subcutaneous injection of a single 100 ug dose of a GalNAc-conjugated siRNA or PBS as vehicle control. On Days 0 and 10 after injection, serum was collected to assess serum MSP concentrations by ELISA using the methods described above. The MSP serum concentration at each timepoint was made relative to the level of MSP in the Day 0 sample for each individual mouse. The results are shown in Table 18. Mice injected with ETD01867 or ETD01868 had the greatest reduction in serum MSP of the additional siRNAs tested. The magnitude of the reduction was comparable to ETD01823 and ETD01800.

[0348] Mice were sacrificed on Day 10 and a liver sample from each was collected and placed in RNAlater (ThermoFisher Cat #AM7020) until processing. Total liver RNA was prepared by homogenizing the liver tissue in homogenization buffer (Maxwell RSC simplyRNA Tissue Kit) using a Percellys 24 tissue homogenizer (Bertin Instruments) set at 5000 rpm for two 10 second cycles. Total RNA from the lysate was purified on a Maxwell RSC 48 platform (Promega Corporation) according to the manufacturer's recommendations. Preparation of cDNA was performed using Quanta qScript cDNA SuperMix (VWR, Catalog #95048-500) according to the manufacturer's instructions. The relative levels of liver MST1 mRNA were assessed by RT-qPCR in triplicate on a QuantStudio™ 6 Pro Real-Time PCR System using TaqMan assays for human MST1 (ThermoFisher, assay #Hs00360684 ml) and the mouse housekeeping gene PPIA (ThermoFisher, assay #Mm02342430_g1) and PerfeCTa® qPCR FastMix®, Low ROX™ (VWR, Catalog #101419-222). Data were normalized to the level in animals receiving PBS. Results are shown in Table 19. Of the additional siRNAs tested in this Example, ETD01867 and ETD01868 had the greatest MST1 mRNA reduction activity, which was comparable to the MST1 mRNA reduction activity observed with ETD01823 and ETD01800.

TABLE 18
Relative Mean Serum Human MSP
Levels in AAV8-TBG-h-MST1 Mice

| | | | | Mean serum human MSP | |
|---|---|---|---|---|---|
| | | | Dose | (Relative to Day 0) | |
| Group | n | Treatment | (ug) | Day 0 | Day 10 |
| 1 | 3 | PBS | | 1.00 | 0.80 |
| 2 | 3 | ETD01823 | 100 | 1.00 | 0.10 |
| 3 | 3 | ETD01800 | 100 | 1.00 | 0.16 |
| 4 | 3 | ETD01860 | 100 | 1.00 | 0.55 |
| 5 | 3 | ETD01861 | 100 | 1.00 | 1.00 |
| 6 | 3 | ETD01862 | 100 | 1.00 | 0.86 |
| 7 | 3 | ETD01863 | 100 | 1.00 | 0.74 |
| 8 | 3 | ETD01864 | 100 | 1.00 | 1.01 |
| 9 | 3 | ETD01865 | 100 | 1.00 | 0.34 |
| 10 | 3 | ETD01866 | 100 | 1.00 | 0.60 |
| 11 | 3 | ETD01867 | 100 | 1.00 | 0.09 |
| 12 | 3 | ETD01868 | 100 | 1.00 | 0.17 |

TABLE 19
Relative Human MST1 mRNA Levels
in Livers of AAV8-TBG-h-MST1 Mice

| | | | Dose | Mean human MST1 mRNA |
|---|---|---|---|---|
| Group | n | Treatment | (ug) | (Relative to Group 1, Day 10) |
| 1 | 3 | PBS | | 1.00 |
| 2 | 3 | ETD01823 | 100 | 0.18 |
| 3 | 3 | ETD01800 | 100 | 0.16 |
| 4 | 3 | ETD01860 | 100 | 1.17 |
| 5 | 3 | ETD01861 | 100 | 2.13 |
| 6 | 3 | ETD01862 | 100 | 1.06 |
| 7 | 3 | ETD01863 | 100 | 1.74 |
| 8 | 3 | ETD01864 | 100 | 0.90 |
| 9 | 3 | ETD01865 | 100 | 0.76 |
| 10 | 3 | ETD01866 | 100 | 0.93 |
| 11 | 3 | ETD01867 | 100 | 0.17 |
| 12 | 3 | ETD01868 | 100 | 0.30 |

### Example 13: Testing the Activity of siRNAs Containing Alternative Modification Patterns of ETD01800 Targeting Human MST-1 in Mice Transfected with AAV8-TBG-h-MST1

[0349] The activities of siRNAs with alternative modification patterns of ETD01800, namely ETD01871-ETD01878 were assessed. The siRNAs with alternative modifications were attached to the GalNAc ligand ETL17 followed by a phosphorothioate linkage at the 5′ end of the sense strand. The activities of ETD01871-ETD01878 were compared to ETD01800. The siRNAs used in this Example are included in Table 24A.

[0350] Six to eight week old female mice (C57Bl/6) were injected with 10 uL of a recombinant adeno-associated virus 8 (AAV8) vector (2.7×10E13 genome copies/mL) by the retroorbital route. The recombinant AAV8 contained the open reading frame and the majority of the 3′UTR of the human MST1 sequence (NM 020998.4) under the control of the human thyroxine binding globulin promoter in an AAV2 backbone packaged in AAV8 capsid (AAV8-TBG-h-MST1). On Day 13 after infection, serum was collected and the level of human MSP in each mouse was measured using the Human MSP/MST1 DuoSet ELISA from R&D (Catalog #DY352). The manufacturer's instructions regarding all reagent preparations for buffers and solutions was followed. A serum sample dilution of 1:100 was utilized for all test samples. Recombinant MSP included in the kit was used to create a standard curve of 10,000 μg/mL to 0 μg/mL. The optical density of the plate was read at 450 nm using a PerkinElmer Envision multimode plate reader. The concentration of MSP in each mouse serum sample was calculated from the standard curve by interpolation using least squares fit (Prism version 9, Software MacKiev).

[0351] Mice were allocated into groups (n=3) such that the groups had similar serum levels of MSP and then given a subcutaneous injection of a single 60 ug dose of a GalNAc-conjugated siRNA or PBS as vehicle control. On Days 0 and 10 after injection, serum was collected to assess serum MSP concentrations by ELISA using the methods described above. The MSP serum concentration at each timepoint was made relative to the level of MSP in the Day 0 sample for each individual mouse. The results are shown in Table 20. The activities of siRNAs with alternative modification patterns of ETD01800, namely ETD01871-ETD01878 were comparable to ETD01800, with ETD01873 and ETD01878 showing the greatest level serum MSP reduction on Day 10.

[0352] Mice were sacrificed on Day 10 and a liver sample from each was collected and placed in RNAlater (ThermoFisher Cat #AM7020) until processing. Total liver RNA was prepared by homogenizing the liver tissue in homogenization buffer (Maxwell RSC simplyRNA Tissue Kit) using a Percellys 24 tissue homogenizer (Bertin Instruments) set at 5000 rpm for two 10 second cycles. Total RNA from the lysate was purified on a Maxwell RSC 48 platform (Promega Corporation) according to the manufacturer's recommendations. Preparation of cDNA was performed using Quanta qScript cDNA SuperMix (VWR, Catalog #95048-500) according to the manufacturer's instructions. The relative levels of liver MST1 mRNA were assessed by RT-qPCR in triplicate on a QuantStudio™ 6 Pro Real-Time PCR System using TaqMan assays for human MST1 (ThermoFisher, assay #Hs00360684 ml) and the mouse housekeeping gene PPIA (ThermoFisher, assay #Mm02342430_g1) and PerfeCTa® qPCR FastMix®, Low ROX™ (VWR, Catalog #101419-222). Data were normalized to the level in animals receiving PBS. Results are shown in Table 21. Mice receiving ETD01800 had substantially lower liver MST1 mRNA on Day 10 relative to mice receiving PBS. Mice receiving any of the alternatively modified siRNAs targeting MST1 also had substantially lower levels in mean liver human MST1 mRNA on Day 10 relative to mice receiving PBS.

TABLE 20
Relative Mean Serum Human MSP
Levels in AAV8-TBG-h-MST1 Mice

| | | | | Mean serum human MSP | | |
|---|---|---|---|---|---|---|
| | | | Dose | (Relative to Day 0) | | |
| Group | n | Treatment | (ug) | Day 0 | Day 4 | Day 10 |
| 1 | 3 | PBS | | 1.00 | 4.18 | 2.45 |
| 2 | 3 | ETD01800 | 60 | 1.00 | 0.39 | 0.34 |
| 3 | 3 | ETD01871 | 60 | 1.00 | 0.48 | 0.57 |
| 4 | 3 | ETD01872 | 60 | 1.00 | 0.60 | 0.48 |
| 5 | 3 | ETD01873 | 60 | 1.00 | 0.86 | 0.19 |
| 6 | 3 | ETD01874 | 60 | 1.00 | 0.66 | 0.30 |
| 7 | 3 | ETD01875 | 60 | 1.00 | 0.85 | 0.38 |
| 8 | 3 | ETD01876 | 60 | 1.00 | 0.63 | 0.51 |
| 9 | 3 | ETD01877 | 60 | 1.00 | 0.39 | 0.44 |
| 10 | 3 | ETD01878 | 60 | 1.00 | 1.71 | 0.20 |

TABLE 21
Relative Human MST1 mRNA Levels
in Livers of AAV8-TBG-h-MST1 Mice

| | | | Dose | Mean human MST1 mRNA |
|---|---|---|---|---|
| Group | n | Treatment | (ug) | (Relative to Group 1, Day 10) |
| 1 | 3 | PBS | | 1.00 |
| 2 | 3 | ETD01800 | 60 | 0.17 |
| 3 | 3 | ETD01871 | 60 | 0.21 |
| 4 | 3 | ETD01872 | 60 | 0.19 |
| 5 | 3 | ETD01873 | 60 | 0.04 |
| 6 | 3 | ETD01874 | 60 | 0.12 |
| 7 | 3 | ETD01875 | 60 | 0.06 |
| 8 | 3 | ETD01876 | 60 | 0.11 |
| 9 | 3 | ETD01877 | 60 | 0.03 |
| 10 | 3 | ETD01878 | 60 | 0.04 |

### Example 14: Testing the Activity of MST-1 siRNAs Containing Alternative Modification Patterns of ETD01867 and ETD01868 in in Mice Transfected with AAV8-TBG-h-MST1

[0353] The activities of siRNAs with alternative modification patterns of ETD01867, namely ETD01963-ETD01966, and siRNAs with alternative modification patterns of ETD01868, namely ETD01967-ETD01972, were assessed. The siRNAs were attached to the GalNAc ligand ETL17 followed by a phosphorothioate linkage at the 5′ end of the sense strand. The siRNAs used in this Example are included in Table 24A.

[0354] Six to eight week old female mice (C571B1/6) were injected with 5 uL of a recombinant adeno-associated virus 8 (AAV8) vector (2.7×10E13 genome copies/mL) by the retroorbital route. The recombinant AAV8 contained the open reading frame and the majority of the 3′ UTR of the human MST1 sequence (NM_020998.4) under the control of the human thyroxine binding globulin promoter in an AAV2 backbone packaged in AAV8 capsid (AAV8-TBG-h-MST1). On Day 13 after infection, serum was collected and the level of human MSP in each mouse was measured using the Human MSP/MST1 DuoSet ELISA from R&D (Catalog #DY352). The manufacturer's instructions regarding all reagent preparations for buffers and solutions was followed. A serum sample dilution of 1:50 was utilized for all test samples. Recombinant MSP included in the kit was used to create a standard curve of 10,000 μg/mL to 0 μg/mL. The optical density of the plate was read at 450 nm using a PerkinElmer Envision multimode plate reader. The concentration of MSP in each mouse serum sample was calculated from the standard curve by interpolation using least squares fit (Prism version 9, Software MacKiev).

[0355] Mice were allocated into groups (n=3) such that the groups had similar serum levels of MSP and then given a subcutaneous injection of a single 60 ug dose of a GalNAc-conjugated siRNA or PBS as vehicle control. On Days 0, 4 and 12 after injection, serum was collected to assess serum MSP concentrations by ELISA using the methods described above. The MSP serum concentration at each timepoint was made relative to the level of MSP in the Day 0 sample for each individual mouse. The results are shown in Table 22. The activities of siRNAs with alternative modification patterns of ETD01867, namely ETD01963-ETD01966, were comparable to ETD01867, with ETD01964 and ETD01966 showing the greatest level serum MSP reduction on Day 12. The activities of siRNAs with alternative modification patterns of ETD01868, namely ETD01967-ETD01972, were comparable to ETD01868, with ETD01972 showing the greatest level serum MSP reduction on Day 12.

[0356] Mice were sacrificed on Day 12 and a liver sample from each was collected and placed in RNAlater (ThermoFisher Cat #AM7020) until processing. Total liver RNA was prepared by homogenizing the liver tissue in homogenization buffer (Maxwell RSC simplyRNA Tissue Kit) using a Percellys 24 tissue homogenizer (Bertin Instruments) set at 5000 rpm for two 10 second cycles. Total RNA from the lysate was purified on a Maxwell RSC 48 platform (Promega Corporation) according to the manufacturer's recommendations. Preparation of cDNA was performed using Quanta qScript cDNA SuperMix (VWR, Catalog #95048-500) according to the manufacturer's instructions. The relative levels of liver MST1 mRNA were assessed by RT-qPCR in triplicate on a QuantStudio™ 6 Pro Real-Time PCR System using TaqMan assays for human MST1 (ThermoFisher, assay #Hs00360684 ml) and the mouse housekeeping gene PPIA (ThermoFisher, assay #Mm02342430_g1) and PerfeCTa® qPCR FastMix®, Low ROX™ (VWR, Catalog #101419-222). Data were normalized to the level in animals receiving PBS. Results are shown in Table 23. The activities of siRNAs with alternative modification patterns of ETD01867, namely ETD01965 and ETD01966, showed similar or slightly better activity than the parent for MST1 mRNA reduction on Day 12. The activities of siRNAs with alternative modification patterns of ETD01868, namely ETD01967 and ETD01972, showed the highest MST1 mRNA reduction on Day 12.

TABLE 22
Relative Mean Serum Human MSP
Levels in AAV8-TBG-h-MST1 Mice

| | | | | Mean serum human MSP | | |
|---|---|---|---|---|---|---|
| | | | Dose | (Relativeto Day 0) | | |
| Group | n | Treatment | (ug) | Day 0 | Day 4 | Day 12 |
| 1 | 3 | PBS | | 1.00 | 1.12 | 1.54 |
| 2 | 3 | ETD01867 | 60 | 1.00 | 0.35 | 0.24 |
| 3 | 3 | ETD01963 | 60 | 1.00 | 0.46 | 0.42 |
| 4 | 3 | ETD01964 | 60 | 1.00 | 0.35 | 0.15 |
| 5 | 3 | ETD01965 | 60 | 1.00 | 0.32 | 0.26 |
| 6 | 3 | ETD01966 | 60 | 1.00 | 0.30 | 0.16 |
| 7 | 3 | ETD01868 | 60 | 1.00 | 0.67 | ND |
| 8 | 3 | ETD01967 | 60 | 1.00 | 0.41 | 0.27 |
| 9 | 3 | ETD01968 | 60 | 1.00 | 0.53 | 0.30 |
| 10 | 3 | ETD01969 | 60 | 1.00 | 0.68 | 0.45 |
| 11 | 3 | ETD01970 | 60 | 1.00 | 0.51 | 0.59 |
| 12 | 3 | ETD01971 | 60 | 1.00 | 0.60 | 0.42 |
| 13 | 3 | ETD01972 | 60 | 1.00 | 0.24 | 0.17 |

ND, not determined

TABLE 23
Relative Human MST1 mRNA Levels
in Livers of AAV8-TBG-h-MST1 Mice

| | | | Dose | Mean human MST1 mRNA |
|---|---|---|---|---|
| Group | n | Treatment | (ug) | (Relative to Group 1, Day 12) |
| 1 | 3 | PBS | | 1.00 |
| 2 | 3 | ETD01867 | 60 | 0.40 |
| 3 | 3 | ETD01963 | 60 | 0.76 |
| 4 | 3 | ETD01964 | 60 | 0.60 |
| 5 | 3 | ETD01965 | 60 | 0.25 |
| 6 | 3 | ETD01966 | 60 | 0.33 |
| 7 | 3 | ETD01868 | 60 | 0.28 |
| 8 | 3 | ETD01967 | 60 | 0.07 |
| 9 | 3 | ETD01968 | 60 | 0.32 |
| 10 | 3 | ETD01969 | 60 | 0.15 |
| 11 | 3 | ETD01970 | 60 | 0.24 |
| 12 | 3 | ETD01971 | 60 | 0.31 |
| 13 | 3 | ETD01972 | 60 | 0.08 |

TABLE 24A
siRNAs Screened for Activity in AAV8-TBG-h-MST1 Mice

| | SEQ | | SEQ | |
|---|---|---|---|---|
| SIRNA | ID | Sense Strand Sequence (5′-3′) | ID | |
| Name | NO: | with GalNAc Moiety | NO: | Antisense Strand Sequence (5′-3′) |
| ETD01723 | 6186 | [ETL1]csusucUfUfgUfCfagacauaaaasusu | 6245 | usUfsuUfaUfgUfcUfgAfcAfaGfaAfgsusu |
| ETD01724 | 6187 | [ETL1]saaaaGfuuuAfAfugucacccasusu | 6246 | usGfsgGfuGfaCfaUfuAfaAfcUfuUfususu |
| ETD01725 | 6188 | [ETL1]sAfaCfuUfcUfudGuCfagaCfaUfaasus | 6247 | usUfsaUfgUfcUfgAfcAfaGfaAfgUfususu |
| | | u | | |
| ETD01726 | 6189 | [ETL1]sUfaAfuGfaCfadCaguCfcUfaaaasusu | 6248 | usUfsuUfaGfgAfcUfgUfgUfcAfuUfasusu |
| ETD01727 | 6190 | [ETL1]sguaaugAfcAfcAfguccuaaasusu | 6249 | usUfsuAfgGfaCfuGfuGfuCfaUfuAfcsusu |
| ETD01728 | 6191 | [ETL1]sgguccuGfGfAfAfGfgaauuauasusu | 6250 | usAfsuAfaUfuCfcUfuCfcAfgGfaCfcsusu |
| ETD01729 | 6192 | [ETL1]scaaccAfGfGfAfGfuguaacauasusu | 6251 | usAfsuGfuUfaCfaCfuCfcUfgGfuUfgsusu |
| ETD01731 | 6193 | [ETL1]sccugAfAfuGfGfuAfuguggugasusu | 6252 | usCfsaCfcAfcAfuAfcCfaUfuCfaGfgsusu |
| ETD01732 | 6194 | [ETL1]scacagUfCfCfUfaaauguggcasusu | 6253 | usGfscCfaCfaUfuUfaGfgAfcUfgUfgsusu |
| ETD01733 | 6195 | [ETL1]scaagccGfcAfGfuucacguuasusu | 6254 | usAfsaCfgUfgAfaCfuGfcGfgCfuUfgsusu |
| ETD01734 | 6196 | [ETL1]sucuuCfaCfgCfgugucucugasusu | 6255 | usCfsaGfaGfaCfaCfgCfgUfgAfaGfasusu |
| ETD01789 | 6197 | [ETL1]sacuaUfUfgCfCfggaauccugasusu | 6256 | usCfsaGfgAfuUfcCfgGfcAfaUfaGfususu |
| ETD01794 | 6198 | [ETL1]sauucGfAfcuAfcugugcccuasusu | 6257 | usAfsgGfgCfaCfaGfuAfgUfcGfaAfususu |
| ETD01795 | 6199 | [ETL1]saguuuGfAfGfAfAfguguggcaasusu | 6258 | usUfsgCfcAfcAfcUfuCfuCfaAfaCfususu |
| ETD01798 | 6200 | [ETL1]saugacAfcAfGfuccuaaaugasusu | 6259 | usCfsaUfuUfaGfgAfcUfgUfgUfcAfususu |
| ETD01799 | 6201 | [ETL1]sacaaaaCfUfUfCfUfugucagaasusu | 6260 | usUfscUfgAfcAfaGfaAfgUfuUfuGfususu |
| ETD01800 | 6202 | [ETL1]sacuuCfUfugUfCfagacauaaasusu | 6261 | usUfsuAfuGfuCfuGfaCfaAfgAfaGfususu |
| ETD01821 | 6203 | [ETL17]sgguccuGfGfAfAfGfgaauuauasusu | 6262 | usAfsuAfaUfuCfcUfuCfcAfgGfaCfcsusu |
| ETD01822 | 6204 | [ETL17]sAfaCfuUfcUfudGuCfagaCfaUfaasu | 6263 | usUfsaUfgUfcUfgAfcAfaGfaAfgUfususu |
| | | su | | |
| ETD01823 | 6205 | [ETL17]scuucUfUfgUfCfagacauaaaasusu | 6264 | usUfsuUfaUfgUfcUfgAfcAfaGfaAfgsusu |
| ETD01826 | 6206 | [ETL17]scaaccAfGfGfAfGfuguaacauasusu | 6265 | usAfsuGfuUfaCfaCfuCfcUfgGfuUfgsusu |
| ETD01827 | 6207 | [ETL17]scuucUfUfgUfCfagacauaaaususu | 6266 | asUfsuUfaUfgUfcUfgAfcAfaGfaAfgsusu |
| ETD01828 | 6208 | [ETL17]scuucUfUfgUfCfagacauaaaasusu | 6267 | usUfsuUfaUfgucugAfcAfaGfaAfgsusu |
| ETD01829 | 6209 | [ETL17]scuucUfUfgUfCfagacauaaaasusu | 6268 | usUfsuUfaugUfcugAfcAfaGfaAfgsusu |
| ETD01830 | 6210 | [ETL17]scuucUfUfgUfCfagacauaaaasusu | 6269 | usUfsuuaUfgUfcUfgAfcAfaGfaAfgsusu |
| ETD01831 | 6211 | [ETL17]scuucUfUfgUfCfagacauaaagsusu | 6270 | csUfsuUfaUfgUfcUfgAfcAfaGfaAfgsusu |
| ETD01832 | 6212 | [ETL17]sgguccuGfGfAfAfGfgaauuauasusu | 6271 | usAfsuaaUfuCfcUfuCfcAfgGfaCfcsusu |
| ETD01833 | 6213 | [ETL17]sgguccuGfGfAfAfGfgaauuauasusu | 6272 | usAfsuAfaUfuccUfuCfcAfgGfaCfcsusu |
| ETD01834 | 6214 | [ETL17]sgguccuGfGfAfAfGfgaauuauasusu | 6273 | usAfsuAfaUfuccuuCfcAfgGfaCfcsusu |
| ETD01835 | 6215 | [ETL17]sgguccuGfGfAfAfGfgaauuauasusu | 6274 | usAfsuAfauuCfcUfuCfcAfgGfaCfcsusu |
| ETD01836 | 6216 | [ETL17]sgguccuGfGfAfAfGfgaauuauasusu | 6275 | usAfsuAfauUfCfcUfuCfcAfgGfaCfcsusu |
| ETD01837 | 6217 | [ETL17]sgguccuGfGfAfAfGfgaauuauususu | 6276 | asAfsuAfaUfuCfcUfuCfcAfgGfaCfcsusu |
| ETD01860 | 6218 | [ETL17]sgacaaCfUfaUfUfgccggaauasusu | 6277 | usAfsuUfcCfgGfcAfaUfaGfuUfgUfcsusu |
| ETD01861 | 6219 | [ETL17]sugacaCfagUfCfcuaaauguasusu | 6278 | usAfscAfuUfuAfgGfaCfuGfuGfuCfasusu |
| ETD01862 | 6220 | [ETL17]saguccuAfaAfuGfuggccuuasusu | 6279 | usAfsaGfgCfcAfcAfuUfuAfgGfaCfususu |
| ETD01863 | 6221 | [ETL17]sgagugUfaaCfaUfcaagcacasusu | 6280 | usGfsuGfcUfuGfaUfgUfuAfcAfcUfcsusu |
| ETD01864 | 6222 | [ETL17]sguguaaCfaUfCfaagcaccgasusu | 6281 | usCfsgGfuGfcUfuGfaUfgUfuAfcAfcsusu |
| ETD01865 | 6223 | [ETL17]sauuaUfaaUfCfCfCfcaaccgaasusu | 6282 | usUfscGfgUfuGfgGfgAfuUfaUfaAfususu |
| ETD01866 | 6224 | [ETL17]suauaaUfCfCfCfCfaaccgaguasusu | 6283 | usAfscUfcGfgUfuGfgGfgAfuUfaUfasusu |
| ETD01867 | 6225 | [ETL17]sucuuGfucAfGfacauaaagcasusu | 6284 | usGfscUfuUfaUfgUfcUfgAfcAfaGfasusu |
| ETD01868 | 6226 | [ETL17]suuguCfagaCfaUfaaagccaasusu | 6285 | usUfsgGfcUfuUfaUfgUfcUfgAfcAfasusu |
| ETD01871 | 6227 | [ETL17]sacuuCfUfugUfCfagacauaaasusu | 6286 | usUfsuAfuGfuCfuGfaCfaAfgAfaGfususu |
| ETD01872 | 6228 | [ETL17]sacuucUfugUfCfagacauaaasusu | 6287 | usUfsuAfuGfuCfuGfaCfaAfgAfaGfususu |
| ETD01873 | 6229 | [ETL17]sacuucuUfgUfCfagacauaaasusu | 6288 | usUfsuAfuGfuCfuGfaCfaAfgAfaGfususu |
| ETD01874 | 6230 | [ETL17]sacuuCfUfugUfCfagacauaaususu | 6289 | asUfsuAfuGfuCfuGfaCfaAfgAfaGfususu |
| ETD01875 | 6231 | [ETL17]sacuuCfUfugUfCfagacauaaasusu | 6290 | usUfsuauGfuCfuGfaCfaAfgAfaGfususu |
| ETD01876 | 6232 | [ETL17]sacuuCfUfugUfCfagacauaaasusu | 6291 | usUfsuAfuguCfuGfaCfaAfgAfaGfususu |
| ETD01877 | 6233 | [ETL17]sacuuCfUfugUfCfagacauaaasusu | 6292 | usUfsuaUfgUfcuGfaCfaAfgAfaGfususu |
| ETD01878 | 6234 | [ETL17]sacuuCfUfugUfCfagacauaaasusu | 6293 | usUfsuaugUfcuGfaCfaAfgAfaGfususu |
| ETD01963 | 6235 | [ETL17]sucuuGfucAfGfacauaaagcasusu | 6294 | usGfscuuUfaUfgUfcUfgAfcAfaGfasusu |
| ETD01964 | 6236 | [ETL17]sucuuGfucAfGfacauaaagcasusu | 6295 | usGfscuuUfaugUfcUfgAfcAfaGfasusu |
| ETD01965 | 6237 | [ETL17]sucuuGfucAfGfacauaaagcasusu | 6296 | usGfscUfuUfaUfgucUfgAfcAfaGfasusu |
| ETD01966 | 6238 | [ETL17]sucuuGfucAfGfacauaaagcasusu | 6297 | usGfscUfuuAfugUfcUfgAfcAfaGfasusu |
| ETD01967 | 6239 | [ETL17]suuguCfadGaCfaUfaaagccaasusu | 6298 | usUfsgGfcUfuUfaUfgUfcUfgAfcAfasusu |
| ETD01968 | 6240 | [ETL17]suugucagaCfdAUfaaagccaasusu | 6299 | usUfsgGfcUfuUfaUfgUfcUfgAfcAfasusu |
| ETD01969 | 6241 | [ETL17]suuguCfagaCfaUfaaagccaasusu | 6300 | usUfsggcUfuUfaUfgUfcUfgAfcAfasusu |
| ETD01970 | 6242 | [ETL17]suuguCfagaCfaUfaaagccaasusu | 6301 | usUfsgGfcUfuUfaugUfcUfgAfcAfasusu |
| ETD01971 | 6243 | [ETL17]suuguCfagaCfaUfaaagccaasusu | 6302 | usUfsggcUfuUfaugUfcUfgAfcAfasusu |
| ETD01972 | 6244 | [ETL17]suuguCfagaCfaUfaaagccaasusu | 6303 | usUfsggCfuuuaUfgUfcUfgAfcAfasusu |

TABLE 24B
Base Sequences of Example siRNAs

| | SEQ | Base Sequence (5′-3′) | SEQ | |
|---|---|---|---|---|
| SIRNA | ID | of Sense Strand, | ID | Base Sequence (5′-3′) of Antisense |
| Name | NO: | Without 3′ Overhang | NO: | Strand, Without 3′ Overhang |
| ETD01723 | 6418 | CUUCUUGUCAGACAUAAAA | 6477 | UUUUAUGUCUGACAAGAAG |
| ETD01724 | 6419 | AAAAGUUUAAUGUCACCCA | 6478 | UGGGUGACAUUAAACUUUU |
| ETD01725 | 6420 | AACUUCUUGUCAGACAUAA | 6479 | UUAUGUCUGACAAGAAGUU |
| ETD01726 | 6421 | UAAUGACACAGUCCUAAAA | 6480 | UUUUAGGACUGUGUCAUUA |
| ETD01727 | 6422 | GUAAUGACACAGUCCUAAA | 6481 | UUUAGGACUGUGUCAUUAC |
| ETD01728 | 6423 | GGUCCUGGAAGGAAUUAUA | 6482 | UAUAAUUCCUUCCAGGACC |
| ETD01729 | 6424 | CAACCAGGAGUGUAACAUA | 6483 | UAUGUUACACUCCUGGUUG |
| ETD01731 | 6425 | CCUGAAUGGUAUGUGGUGA | 6484 | UCACCACAUACCAUUCAGG |
| ETD01732 | 6426 | CACAGUCCUAAAUGUGGCA | 6485 | UGCCACAUUUAGGACUGUG |
| ETD01733 | 6427 | CAAGCCGCAGUUCACGUUA | 6486 | UAACGUGAACUGCGGCUUG |
| ETD01734 | 6428 | UCUUCACGCGUGUCUCUGA | 6487 | UCAGAGACACGCGUGAAGA |
| ETD01789 | 6429 | ACUAUUGCCGGAAUCCUGA | 6488 | UCAGGAUUCCGGCAAUAGU |
| ETD01794 | 6430 | AUUCGACUACUGUGCCCUA | 6489 | UAGGGCACAGUAGUCGAAU |
| ETD01795 | 6431 | AGUUUGAGAAGUGUGGCAA | 6490 | UUGCCACACUUCUCAAACU |
| ETD01798 | 6432 | AUGACACAGUCCUAAAUGA | 6491 | UCAUUUAGGACUGUGUCAU |
| ETD01799 | 6433 | ACAAAACUUCUUGUCAGAA | 6492 | UUCUGACAAGAAGUUUUGU |
| ETD01800 | 6434 | ACUUCUUGUCAGACAUAAA | 6493 | UUUAUGUCUGACAAGAAGU |
| ETD01821 | 6435 | GGUCCUGGAAGGAAUUAUA | 6494 | UAUAAUUCCUUCCAGGACC |
| ETD01822 | 6436 | AACUUCUUGUCAGACAUAA | 6495 | UUAUGUCUGACAAGAAGUU |
| ETD01823 | 6437 | CUUCUUGUCAGACAUAAAA | 6496 | UUUUAUGUCUGACAAGAAG |
| ETD01826 | 6438 | CAACCAGGAGUGUAACAUA | 6497 | UAUGUUACACUCCUGGUUG |
| ETD01827 | 6439 | CUUCUUGUCAGACAUAAAU | 6498 | AUUUAUGUCUGACAAGAAG |
| ETD01828 | 6440 | CUUCUUGUCAGACAUAAAA | 6499 | UUUUAUGUCUGACAAGAAG |
| ETD01829 | 6441 | CUUCUUGUCAGACAUAAAA | 6500 | UUUUAUGUCUGACAAGAAG |
| ETD01830 | 6442 | CUUCUUGUCAGACAUAAAA | 6501 | UUUUAUGUCUGACAAGAAG |
| ETD01831 | 6443 | CUUCUUGUCAGACAUAAAG | 6502 | CUUUAUGUCUGACAAGAAG |
| ETD01832 | 6444 | GGUCCUGGAAGGAAUUAUA | 6503 | UAUAAUUCCUUCCAGGACC |
| ETD01833 | 6445 | GGUCCUGGAAGGAAUUAUA | 6504 | UAUAAUUCCUUCCAGGACC |
| ETD01834 | 6446 | GGUCCUGGAAGGAAUUAUA | 6505 | UAUAAUUCCUUCCAGGACC |
| ETD01835 | 6447 | GGUCCUGGAAGGAAUUAUA | 6506 | UAUAAUUCCUUCCAGGACC |
| ETD01836 | 6448 | GGUCCUGGAAGGAAUUAUA | 6507 | UAUAAUUCCUUCCAGGACC |
| ETD01837 | 6449 | GGUCCUGGAAGGAAUUAUU | 6508 | AAUAAUUCCUUCCAGGACC |
| ETD01860 | 6450 | GACAACUAUUGCCGGAAUA | 6509 | UAUUCCGGCAAUAGUUGUC |
| ETD01861 | 6451 | UGACACAGUCCUAAAUGUA | 6510 | UACAUUUAGGACUGUGUCA |
| ETD01862 | 6452 | AGUCCUAAAUGUGGCCUUA | 6511 | UAAGGCCACAUUUAGGACU |
| ETD01863 | 6453 | GAGUGUAACAUCAAGCACA | 6512 | UGUGCUUGAUGUUACACUC |
| ETD01864 | 6454 | GUGUAACAUCAAGCACCGA | 6513 | UCGGUGCUUGAUGUUACAC |
| ETD01865 | 6455 | AUUAUAAUCCCCAACCGAA | 6514 | UUCGGUUGGGGAUUAUAAU |
| ETD01866 | 6456 | UAUAAUCCCCAACCGAGUA | 6515 | UACUCGGUUGGGGAUUAUA |
| ETD01867 | 6457 | UCUUGUCAGACAUAAAGCA | 6516 | UGCUUUAUGUCUGACAAGA |
| ETD01868 | 6458 | UUGUCAGACAUAAAGCCAA | 6517 | UUGGCUUUAUGUCUGACAA |
| ETD01871 | 6459 | ACUUCUUGUCAGACAUAAA | 6518 | UUUAUGUCUGACAAGAAGU |
| ETD01872 | 6460 | ACUUCUUGUCAGACAUAAA | 6519 | UUUAUGUCUGACAAGAAGU |
| ETD01873 | 6461 | ACUUCUUGUCAGACAUAAA | 6520 | UUUAUGUCUGACAAGAAGU |
| ETD01874 | 6462 | ACUUCUUGUCAGACAUAAU | 6521 | AUUAUGUCUGACAAGAAGU |
| ETD01875 | 6463 | ACUUCUUGUCAGACAUAAA | 6522 | UUUAUGUCUGACAAGAAGU |
| ETD01876 | 6464 | ACUUCUUGUCAGACAUAAA | 6523 | UUUAUGUCUGACAAGAAGU |
| ETD01877 | 6465 | ACUUCUUGUCAGACAUAAA | 6524 | UUUAUGUCUGACAAGAAGU |
| ETD01878 | 6466 | ACUUCUUGUCAGACAUAAA | 6525 | UUUAUGUCUGACAAGAAGU |
| ETD01963 | 6467 | UCUUGUCAGACAUAAAGCA | 6526 | UGCUUUAUGUCUGACAAGA |
| ETD01964 | 6468 | UCUUGUCAGACAUAAAGCA | 6527 | UGCUUUAUGUCUGACAAGA |
| ETD01965 | 6469 | UCUUGUCAGACAUAAAGCA | 6528 | UGCUUUAUGUCUGACAAGA |
| ETD01966 | 6470 | UCUUGUCAGACAUAAAGCA | 6529 | UGCUUUAUGUCUGACAAGA |
| ETD01967 | 6471 | UUGUCAGACAUAAAGCCAA | 6530 | UUGGCUUUAUGUCUGACAA |
| ETD01968 | 6472 | UUGUCAGACAUAAAGCCAA | 6531 | UUGGCUUUAUGUCUGACAA |
| ETD01969 | 6473 | UUGUCAGACAUAAAGCCAA | 6532 | UUGGCUUUAUGUCUGACAA |
| ETD01970 | 6474 | UUGUCAGACAUAAAGCCAA | 6533 | UUGGCUUUAUGUCUGACAA |
| ETD01971 | 6475 | UUGUCAGACAUAAAGCCAA | 6534 | UUGGCUUUAUGUCUGACAA |
| ETD01972 | 6476 | UUGUCAGACAUAAAGCCAA | 6535 | UUGGCUUUAUGUCUGACAA |

TABLE 24C
Subset of Example siRNAs

| | SEQ | | SEQ | |
|---|---|---|---|---|
| siRNA | ID | Sense Strand Sequence (5′-3′) with | ID | |
| Name | NO: | GalNAc Moiety | NO: | Antisense Strand Sequence (5′-3′) |
| ETD01828 | 6208 | [ETL17]scuucUfUfgUfCfagacauaaaasusu | 6267 | usUfsuUfaUfgucugAfcAfaGfaAfgsusu |
| ETD01834 | 6214 | [ETL17]sgguccuGfGfAfAfGfgaauuauasusu | 6273 | usAfsuAfaUfuccuuCfcAfgGfaCfcsusu |
| ETD01835 | 6215 | [ETL17]sgguccuGfGfAfAfGfgaauuauasusu | 6274 | usAfsuAfauuCfcUfuCfcAfgGfaCfcsusu |
| ETD01836 | 6216 | [ETL17]sgguccuGfGfAfAfGfgaauuauasusu | 6275 | usAfsuAfauUfCfcUfuCfcAfgGfaCfcsus |
| | | | | u |
| ETD01873 | 6229 | [ETL17]sacuucuUfgUfCfagacauaaasusu | 6288 | usUfsuAfuGfuCfuGfaCfaAfgAfaGfusus |
| | | | | u |
| ETD01878 | 6234 | [ETL17]sacuuCfUfugUfCfagacauaaasusu | 6293 | usUfsuaugUfcuGfaCfaAfgAfaGfususu |
| ETD01966 | 6238 | [ETL17]sucuuGfucAfGfacauaaagcasusu | 6297 | usGfscUfuuAfugUfcUfgAfcAfaGfasusu |
| ETD01972 | 6244 | [ETL17]suuguCfagaCfaUfaaagccaasusu | 6303 | usUfsggCfuuuaUfgUfcUfgAfcAfasusu |

TABLE 24D
Base Sequences of Subset of Example siRNAs

| | SEQ | Base Sequence (5′-3′) | | Base Sequence (5′-3′) |
|---|---|---|---|---|
| SIRNA | ID | of Sense Strand, | SEQ | of Antisense |
| Name | NO: | Without 3′ Overhang | ID NO: | Strand, Without 3′ Overhang |
| ETD01828 | 6440 | CUUCUUGUCAGACAUAAAA | 6499 | UUUUAUGUCUGACAAGAAG |
| ETD01834 | 6446 | GGUCCUGGAAGGAAUUAUA | 6505 | UAUAAUUCCUUCCAGGACC |
| ETD01835 | 6447 | GGUCCUGGAAGGAAUUAUA | 6506 | UAUAAUUCCUUCCAGGACC |
| ETD01836 | 6448 | GGUCCUGGAAGGAAUUAUA | 6507 | UAUAAUUCCUUCCAGGACC |
| ETD01873 | 6461 | ACUUCUUGUCAGACAUAAA | 6520 | UUUAUGUCUGACAAGAAGU |
| ETD01878 | 6466 | ACUUCUUGUCAGACAUAAA | 6525 | UUUAUGUCUGACAAGAAGU |
| ETD01966 | 6470 | UCUUGUCAGACAUAAAGCA | 6529 | UGCUUUAUGUCUGACAAGA |
| ETD01972 | 6476 | UUGUCAGACAUAAAGCCAA | 6535 | UUGGCUUUAUGUCUGACAA |

[0357] The sense strands of the example siRNAs in Table 24A each include a GalNAc moiety as indicated. In Table 24A and Table 24C, Nf (e.g. Af, Cf, Gf, Tf, or Uf) is a 2′ fluoro-modified nucleoside, dN (e.g. dA, dC, dG, dT, or dU) is a 2′ deoxy-modified nucleoside, n (e.g. a, c, g, t, or u) is a 2′ O-methyl modified nucleoside, and “s” is a phosphorothioate linkage.

### Example 15: Inhibition of MST1 in a Mouse Model of Lung Inflammation Via LPS Exposure Using MST1 siRNAs

[0358] In this experiment, a mouse model of lung inflammation induced by acute LPS exposure was used to evaluate the effect of siRNA inhibition of MST1. In this LPS induced model, mice were exposed to LPS for 6 hours which will resulted in a transient inflammatory response. Lung inflammation was assessed by measuring neutrophils, macrophages, eosinophils, lymphocytes and cytokines in bronchoalveolar lavage fluid and lung tissue.

[0359] Briefly, mice were divided into five groups: Group 1—a group treated with vehicle and saline intratracheal instillation, Group 2—a group treated with vehicle and LPS intratracheal instillation, Group 3—a group treated with low dose MST1 siRNA ETD01218 (50 ug) and LPS intratracheal instillation, Group 4—a group treated with high dose MST1 siRNA ETD01218 (150 ug) and LPS intratracheal instillation, Group 5—a group treated with Betamethasone and LPS intratracheal instillation. Each group contained twelve mice (male). The sequence of ETD01218 is shown in Table 29.

[0360] Administration of siRNA was achieved with a 100 μL subcutaneous injection of siRNA resuspended in PBS at concentrations of 0.5 mg/ml or 1.5 mg/ml. Administration of 3 mg/kg Betamethasone was achieved via oral gavage with Betamethasone resuspended in PBS at a concentration of 0.3 mg/ml. At days −21, −14, and −7, Group 1 mice were injected subcutaneously with vehicle, Group 2 mice were injected subcutaneously with vehicle, Group 3 mice were injected subcutaneously with low dose MST1 siRNA ETD01218 targeting mouse MST1, Group 4 mice were injected subcutaneously with high dose MST1 siRNA ETD01218 targeting mouse MST1, and Group 5 mice were injected subcutaneously with vehicle. On Day 1, 30 minutes prior to LPS administration, Group 5 mice were dosed with Betamethasone via oral gavage.

[0361] On Day 1, 6 hours after LPS administration, bronchoalveolar lavage fluid was collected and the mice were euthanized by isoflurane inhalation and exsanguination of abdominal aorta. Final blood samples were collected, and livers and lungs are removed, and a section placed in RNAlater for mRNA isolation.

[0362] Mice were sacrificed on Day 1, 6 hours after LPS administration, and a liver and lung samples from each was collected and placed in RNAlater (ThermoFisher Cat #AM7020) until processing. Total liver RNA was prepared by homogenizing the liver tissue in homogenization buffer (Maxwell RSC simplyRNA Tissue Kit) using a Percellys 24 tissue homogenizer (Bertin Instruments) set at 5000 rpm for two 10 second cycles. Total RNA from the lysate was purified on a Maxwell RSC 48 platform (Promega Corporation) according to the manufacturer's recommendations. Preparation of cDNA was performed using Quanta qScript cDNA SuperMix (VWR, Catalog #95048-500) according to the manufacturer's instructions. The relative levels of liver MST1 mRNA were assessed by RT-qPCR in triplicate on a QuantStudio™ 6 Pro Real-Time PCR System using TaqMan assays for mouse MST1 (ThermoFisher, assay #Mm01229834_m1) and the mouse housekeeping gene PPIA (ThermoFisher, assay #Mm02342430_g1) and PerfeCTa® qPCR FastMix®, Low ROX™ (VWR, Catalog #101419-222). Data were normalized to the level in animals receiving vehicle and LPS intratracheal instillation. MST1 mRNA expression in the liver tissue from mice dosed with the MST1 siRNA and administered LPS was reduced by 85% and 98%, low and high dose MST1 siRNA respectively, compared to MST1 mRNA expression in the liver tissue from mice dosed with the vehicle and administered LPS (Table 25). MSP protein in the liver tissue from mice dosed with the MST1 siRNA and administered LPS was reduced from 8.94 ng/ml to 1.71 ng/ml in the low dose MST1 siRNA and to 0.53 ng/ml in the high dose MST1 siRNA. This equates to an 810% and 94% reduction, low and high dose MST1 siRNA respectively, compared to MSP protein in the liver tissue from mice dosed with the vehicle and administered LPS (Table 25). MSP protein in the serum from mice dosed with the MST1 siRNA and administered LPS was reduced by ˜80% and ˜90%, low and high dose MST1 siRNA respectively, compared to MSP protein in the serum from mice dosed with the vehicle and administered LPS (Table 26). The high dose MST1 siRNA decreased in neutrophil, eosinophils and lymphocytes counts, 45%, 30%, and 48%, respectively, in the bronchoalveolar lavage fluid in LPS exposed mice compared to the neutrophil, eosinophils and lymphocytes counts in the bronchoalveolar lavage fluid in LPS exposed mice that receive the vehicle control (Table 27). Whereas, the low dose MST1 siRNA is able to decrease in neutrophil, eosinophils and lymphocytes counts, 42%, 40%, and 14%, respectively, in the bronchoalveolar lavage fluid in LPS exposed mice compared to the neutrophil, eosinophils and lymphocytes counts in the bronchoalveolar lavage fluid in LPS exposed mice that receive the vehicle control (Table 27). The ability of the MST1 siRNAs to lower the neutrophil, eosinophils and lymphocytes counts was comparable to the positive control Betamethasone which is able to decrease in neutrophil, eosinophils and lymphocytes counts, 48%, 32%, and 41%, respectively, in the bronchoalveolar lavage fluid in LPS exposed mice compared to the neutrophil, eosinophils and lymphocytes counts in the bronchoalveolar lavage fluid in LPS exposed mice that receive the vehicle control (Table 27). Additionally, MST1 siRNA, as well as the positive control Betamethasone, was able to reduce the pro-inflammatory cytokines, IL-1b, IL-6. KC-GRO, MCP-1 and TNF-α (Table 28). These results show that the MST1 siRNA elicited knockdown of MST1 mRNA and MSP in liver tissue and reduced circulating MSP in serum, and that the decrease in MST1 mRNA and MSP expression corresponds with a decrease in neutrophil, eosinophils and lymphocytes counts and associated cytokines in the bronchoalveolar lavage fluid in mice exposed to LPS.

TABLE 25

| | | | siRNA | siRNA | |
|---|---|---|---|---|---|
| | Vehicle | Vehicle | MST1 50 ug | MST1 150 ug | Betamethasone |
| | PBS | LPS | | | |
| MST1 Liver mRNA | 2.54 | 1.12 | 0.17 | 0.08 | 0.73 |
| relative expression | | | | | |
| MSP Liver protein | 10.28 | 8.94 | 1.71 | 0.53 | 6.73 |
| [ng/ml] | | | | | |

TABLE 26

| | | | | siRNA | siRNA | |
|---|---|---|---|---|---|---|
| | | Vehicle | Vehicle | MST1 50 ug | MST1 150 ug | Betamethasone |
| | | PBS | LPS | | | |
| MSP Serum | Day −21 | 3.85 | 3.52 | 3.52 | 4.32 | 3.60 |
| protein | Day −2 | 4.41 | 4.36 | 0.77 | 0.32 | 4.60 |
| [ng/ml] | Day 1 | 4.95 | 4.23 | 0.91 | 0.39 | 5.23 |

TABLE 27

| | | | | siRNA | siRNA | |
|---|---|---|---|---|---|---|
| | | Vehicle | Vehicle | MST1 50 ug | MST1 150 ug | Betamethasone |
| | | PBS | LPS | | | |
| BAL | Neutrophil | 76.75 | 317.30 | 213.80 | 172.70 | 164.50 |
| Cell | Macrophage | 56.67 | 37.67 | 44.17 | 36.42 | 32.75 |
| Counts | Eosinophil | 4.82 | 2.82 | 1.67 | 2.00 | 1.91 |
| | Lymphocyte | 7.42 | 7.25 | 6.25 | 4.46 | 4.27 |

TABLE 28

| | | | siRNA | siRNA | |
|---|---|---|---|---|---|
| | Vehicle | Vehicle | MST1 50 ug | MST1 150 ug | Betamethasone |
| | PBS | LPS | | | |
| GM-CSF | 50 | 284 | 98.79 | 272.7 | 50 |
| IL-1b | 32 | 55.79 | 32 | 32 | 32 |
| IL-6 | 317.8 | 8473 | 5071 | 4530 | 620.1 |
| KC-GRO | 229.1 | 9001 | 7342 | 7641 | 3721 |
| MCP-1 | 8 | 485.4 | 336.7 | 369.1 | 8 |
| TNF-a | 30.61 | 5174 | 3677 | 3019 | 211.2 |

TABLE 29
Example siRNA Sequences

| | SEQ | sense strand | SEQ | |
|---|---|---|---|---|
| SIRNA | ID | sequence | ID | antisense strand |
| Name | NO: | (5′-3′) | NO: | sequence (5′-3′) |
| ETD01218 | 6317 | [ETL1]cscsugCfa | 6318 | usCfsauuGfuccaua |
| | | UfuAfuggacaauga | | aUfgCfaggsusu |
| | | susu | | |

### Example 16: Inhibition of MST1 in a Non-Human Primates Using MST1 siRNAs

[0363] In this experiment, non-human primates will be used to evaluate the efficacy of siRNA inhibition of MST1.

[0364] Briefly, cynomolgus monkeys, will be divided into 4 groups: Group 1—this group will be treated with siRNA ETD01821, Group 2—this group will be treated with siRNA ETD01822, Group 3—this group treated with siRNA ETD01823, and Group 4—this group will be treated with siRNA ETD01826. These siRNAs are shown in Table 30. Their sequences are included in Table 24A, and these siRNAs were derivatives of ETD01728, ED01725, ETD01723 and ETD01729, respectively. Each group will contain three cynomolgus monkeys (males).

[0365] Administration of siRNA will be achieved with a 1 mL subcutaneous injection of siRNA resuspended in PBS at concentration of 25 mg/ml. At Day 0, Group 1 cynomologus monkeys will be injected subcutaneously with siRNA ETD01723, Group 2 cynomologus monkeys will be injected subcutaneously with siRNA ETD01725, Group 3 cynomologus monkeys will be injected subcutaneously with siRNA ETD01728, and Group 4 cynomologus monkeys will be injected subcutaneously with siRNA ETD01729.

[0366] 2 days prior to siRNA administration, liver biopsies will be collected along with serum samples. On Day 28, final liver biopsies and blood samples will be collected and the livers sections placed in RNAlater for mRNA isolation.

[0367] Total liver RNA will be isolated from tissue and placed in RNAlater solution using the PureLink kit according to the manufacturer's protocol (ThermoFisher Cat. No. 12183020). The reverse transcriptase reaction is performed according to the manufacturer's protocol. Samples are stored at −80° C. until real-time qPCR is performed in triplicate using TaqMan Gene Expression Assays TaqMan assays for cynomolgus MST1 (ThermoFisher, assay #Mf02878573_g1) and the cynomolgus housekeeping gene GAPDH (ThermoFisher, assay #Mf04392546_g1). A decrease in MST1 mRNA in the liver tissue and circulating MSP in the serum from cynomologus monkeys dosed with the MST1 siRNA1 is expected compared to MST1 mRNA or MSP expression in the liver tissue and circulating MSP in the blood from samples taken prior to dosing. These results are expected to show that the MST1 siRNA elicits knockdown of MST1 mRNA and and reduces circulating MSP in non-human primates.

TABLE 30
Example siRNAs
SIRNA Name

ETD01821
ETD01822
ETD01823
ETD01826

### Example 18: GalNAc Ligand for Hepatocyte Targeting of Oligonucleotides

[0368] Without limiting the disclosure to these individual methods, there are at least two general methods for attachment of multivalent N-acetylgalactosamine (GalNAc) ligands to oligonucleotides: solid or solution-phase conjugations. GalNAc ligands may be attached to solid phase resin for 3′ conjugation or at the 5′ terminus using GalNAc phosphoramidite reagents. GalNAc phosphoramidites may be coupled on solid phase as for other nucleosides in the oligonucleotide sequence at any position in the sequence. Reagents for GalNAc conjugation to oligonucleotides are shown in Table 31.

### Example 17: Oligonucleotide Synthesis

[0369] Oligonucleotides such as siRNAs may be synthesized according to phosphoramidite technology on a solid phase. For example, a K&A oligonucleotide synthesizer may be used. Syntheses may be performed on a solid support made of controlled pore glass (CPG, 500 Å or 600 Å, obtained from AM Chemicals, Oceanside, CA, USA). All 2′-OMe and 2′-F phosphoramidites may be purchased from Hongene Biotech (Union City, CA, USA). All phosphoramidites may be dissolved in anhydrous acetonitrile (100 mM) and molecular sieves (3 Å) may be added. 5-Benzylthio-1H-tetrazole (BTT, 250 mM in acetonitrile) or 5-Ethylthio-1H-tetrazole (ETT, 250 mM in acetonitrile) may be used as activator solution. Coupling times may be 9-18 min (e.g. with a GalNAc such as ETL17), 6 min (e.g. with 2′OMe and 2′F). In order to introduce phosphorothioate linkages, a 100 mM solution of 3-phenyl 1,2,4-dithiazoline-5-one (POS, obtained from PolyOrg, Inc., Leominster, Mass., USA) in anhydrous acetonitrile may be employed.

[0370] After solid phase synthesis, the dried solid support may be treated with a 1:1 volume solution of 40 wt. % methylamine in water and 28% ammonium hydroxide solution (Aldrich) for two hours at 30° C. The solution may be evaporated and the solid residue may be reconstituted in water and purified by anionic exchange HPLC using a TKSgel SuperQ-5PW 13u column. Buffer A may be 20 mM Tris, 5 mM EDTA, pH 9.0 and contained 20% Acetonitrile and buffer B may be the same as buffer A with the addition of 1 M sodium chloride. UV traces at 260 nm may be recorded. Appropriate fractions may be pooled then desalted using Sephadex G-25 medium.

[0371] Equimolar amounts of sense and antisense strand may be combined to prepare a duplex. The duplex solution may be prepared in 0.1×PBS (Phosphate-Buffered Saline, 1×, Gibco). The duplex solution may be annealed at 95° C. for 5 min, and cooled to room temperature slowly. Duplex concentration may be determined by measuring the solution absorbance on a UV-Vis spectrometer at 260 nm in 0.1×PBS. For some experiments, a conversion factor may be calculated from an experimentally determined extinction coefficient.

TABLE 31
GalNAc Conjugation Reagents

| Type of conjugation | Structure |
|---|---|
| Solid phase 3′ attachment where squiggly line is rest of oligonucleotide chain and right-most OH is where attachment' to solid phase is. | [chemical structure] |
| | This GalNAc ligand may be referred to as “GalNAc23” or “GalNAc#23.” |
| Solid phase 5′ attachment phosphoramidite | [chemical structure] |
| Solid phase 5′ attachment Phosphoramidite | [chemical structure] |
| Solution phase Carboxylic acid for amide coupling anywhere on oligonucleotide | [chemical structure] |
| | Where Ac is an acetyl group or other hydroxyl protecting group that can be removed under |
| | basic, acid or reducing conditions. |

[0372] In solution phase conjugation, the oligonucleotide sequence-including a reactive conjugation site—is formed on the resin. The oligonucleotide is then removed from the resin and GalNAc is conjugated to the reactive site.

[0373] The carboxy GalNAc derivatives may be coupled to amino-modified oligonucleotides. The peptide coupling conditions are known to the skilled in the art using a carbodiimide coupling agent like DCC (N,N′-Dicyclohexylcarbodiimide), EDC (N-(3-dimethylaminopropyl)-N′-ethylcarbodiimide) or EDC·HCl (N-(3-dimethylaminopropyl)-N′-ethylcarbodiimide hydrochloride and an additive like HOBt (1-hydroxybenztriazole), HOSu (N-hydroxysuccinimide), TBTU (N,N,N′,N′-Tetramethyl-O-(benzotriazol-1-yl)uronium tetrafluoroborate, HBTU (2-(1H-benzotriazol-1-yl)-1,1,3,3-tetramethyluronium hexafluorophosphate) or HOAt (1-Hydroxy-7-azabenzotriazole and common combinations thereof such as TBTU/HOBt or HBTU/HOAt to form activated amine-reactive esters.

[0374] Amine groups may be incorporated into oligonucleotides using a number of known, commercially available reagents at the 5′ terminus, 3′ terminus or anywhere in between.

[0375] Non-limiting examples of reagents for oligonucleotide synthesis to incorporate an amino group include:
[0376] 5′ attachment:
[0377] 6-(4-Monomethoxytritylamino)hexyl-(2-cyanoethyl)-(N,N-diisopropyl)-phosphoramidite CAS Number: 114616-27-2
[0378] 5′-Amino-Modifier TEG CE-Phosphoramidite
[0379] 10-(O-trifluoroacetamido-N-ethyl)-triethyleneglycol-1-[(2-cyanoethyl)-(N,N-diisopropyl)]-phosphoramidite
[0380] 3′ attachment:
[0381] 3′-Amino-Modifier Serinol CPG
[0382] 3-Dimethoxytrityloxy-2-(3-(fluorenylmethoxycarbonylamino)propanamido)propyl-1-O-succinyl-long chain alkylamino-CPG (where CPG stands for controlled-pore glass and is the solid support)
[0383] Amino-Modifier Serinol Phosphoramidite
[0384] 3-Dimethoxytrityloxy-2-(3-(fluorenylmethoxycarbonylamino)propanamido)propyl-1-O-(2-cyanoethyl)-(N,N-diisopropyl)-phosphoramidite

[0385] Internal (base modified):
[0386] Amino-Modifier C6 dT
[0387] 5′-Dimethoxytrityl-5-[N-(trifluoroacetylaminohexyl)-3-acrylimido]-2′-deoxyUridine,3′-[(2-cyanoethyl)-(N,N-diisopropyl)]-phosphoramidite. CAS Number: 178925-21-8

[0388] Solution phase conjugations may occur after oligonucleotide synthesis via reactions between non-nucleosidic nucleophilic functional groups that are attached to the oligonucleotide and electrophilic GalNAc reagents. Examples of nucleophilic groups include amines and thiols, and examples of electrophilic reagents include activated esters (e. g. N-hydroxysuccinimide, pentafluorophenyl) and maleimides.

### Example 19: GalNAc Ligands for Hepatocyte Targeting of Oligonucleotides

[0389] Without limiting the disclosure to these individual methods, there are at least two general methods for attachment of multivalent N-acetylgalactosamine (GalNAc) ligands to oligonucleotides: solid or solution-phase conjugations. GalNAc ligands may be attached to solid phase resin for 3′ conjugation or at the 5′ terminus using GalNAc phosphoramidite reagents. GalNAc phosphoramidites may be coupled on solid phase as for other nucleosides in the oligonucleotide sequence at any position in the sequence. A non-limiting example of a phosphoramidite reagent for GalNAc conjugation to a 5′ end oligonucleotide is shown in Table 32.

TABLE 32
GalNAc Conjugation Reagent

| Type of | |
|---|---|
| conjugation | Structure |
| Solid phase 5′ attachment phosphoramidite | [chemical structure] |

[0390] The following includes examples of synthesis reactions used to create a GalNAc moiety:

[chemical structure]

[chemical structure]

### General Procedure for Preparation of Compound 2A

[chemical structure]

[0392] To a solution of Compound 1A (500 g, 4.76 mol, 476 mL) in 2-Methyl-THF (2.00 L) is added CbzCl (406 g, 2.38 mol, 338 mL) in 2-Methyl-THF (750 mL) dropwise at 0° C. The mixture is stirred at 25° C. for 2 hrs under N₂ atmosphere. TLC (DCM:MeOH=20:1, PMA) may indicate CbzCl is consumed completely and one new spot (R_{f}=0.43) formed. The reaction mixture is added HCl/EtOAc (1 N, 180 mL) and stirred for 30 mins, white solid is removed by filtration through celite, the filtrate is concentrated under vacuum to give Compound 2A (540 g, 2.26 mol, 47.5% yield) as a pale yellow oil and used into the next step without further purification. ¹H NMR: δ 7.28-7.41 (m, 5H), 5.55 (br s, 1H), 5.01-5.22 (m, 2H), 3.63-3.80 (m, 2H), 3.46-3.59 (m, 4H), 3.29-3.44 (m, 2H), 2.83-3.02 (m, 1H).

### General Procedure for Preparation of Compound 4A

[chemical structure]

[0394] To a solution of Compound 3A (1.00 kg, 4.64 mol, HCl) in pyridine (5.00 L) is added acetyl acetate (4.73 kg, 46.4 mol, 4.34 L) dropwise at 0° C. under N₂ atmosphere. The mixture is stirred at 25° C. for 16 hrs under N₂ atmosphere. TLC (DCM:MeOH=20:1, PMA) indicated Compound 3A is consumed completely and two new spots (R_{f}=0.35) formed. The reaction mixture is added to cold water (30.0 L) and stirred at 0° C. for 0.5 hr, white solid formed, filtered and dried to give Compound 4A (1.55 kg, 3.98 mol, 85.8% yield) as a white solid and used in the next step without further purification. ¹H NMR: δ 7.90 (d, J 9.29 Hz, 1H), 5.64 (d, J 8.78 Hz, 1H), 5.26 (d, J 3.01 Hz, 1H), 5.06 (dd, J 11.29, 3.26 Hz, 1H), 4.22 (t, J 6.15 Hz, 1H), 3.95-4.16 (m, 3H), 2.12 (s, 3H), 2.03 (s, 3H), 1.99 (s, 3H), 1.90 (s, 3H), 1.78 (s, 3H).

### General Procedure for Preparation of Compound 5A

[chemical structure]

[0396] To a solution of Compound 4A (300 g, 771 mmol) in DCE (1.50 L) is added TMSOTf (257 g 1.16 mol, 209 mL) and stirred for 2 hrs at 60° C., and then stirred for 1 hr at 25° C. Compound 2A (203 g, 848 mmol) is dissolved in DCE (1.50 L) and added 4 Å powder molecular sieves (150 g) stirring for 30 mins under N₂ atmosphere. Then the solution of Compound 4A in DCE is added dropwise to the mixture at 0° C. The mixture is stirred at 25° C. for 16 hrs under N₂ atmosphere. TLC (DCM:MeOH=25:1, PMA) indicated Compound 4A is consumed completely and new spot (R_{f}=0.24) formed. The reaction mixture is filtered and washed with sat. NaHCO₃ (2.00 L), water (2.00 L) and sat. brine (2.00 L). The organic layer is dried over anhydrous Na₂SO₄, filtered and concentrated under reduced pressure to give a residue. The residue is triturated with 2-Me-THE/heptane (5/3, v/v, 1.80 L) for 2 hrs, filtered and dried to give Compound 5A (225 g, 389 mmol, 50.3% yield, 98.4% purity) as a white solid. ¹H NMR: δ 7.81 (d, J 9.29 Hz, 1H), 7.20-7.42 (m, 6H), 5.21 (d, J 3.26 Hz, 1H), 4.92-5.05 (m, 3H), 4.55 (d, J 8.28 Hz, 1H), 3.98-4.07 (m, 3H), 3.82-3.93 (m, 1H), 3.71-3.81 (m, 1H), 3.55-3.62 (m, 1H), 3.43-3.53 (m, 2H), 3.37-3.43 (m, 2H), 3.14 (q, J 5.77 Hz, 2H), 2.10 (s, 3H), 1.99 (s, 3H), 1.89 (s, 3H), 1.77 (s, 3H).

### General Procedure for Preparation of NAcegal-Linker-Tosylate Salt

[chemical structure]

[0398] To a solution of Compound 5A (200 g, 352 mmol) in THF (1.0 L) is added dry Pd/C (15.0 g, 10% purity) and TsOH (60.6 g, 352 mmol) under N₂ atmosphere. The suspension is degassed under vacuum and purged with H₂ several times. The mixture is stirred at 25° C. for 3 hrs under H₂ (45 psi) atmosphere. TLC (DCM:MeOH=10:1, PMA) indicated Compound 5A is consumed completely and one new spot (R_{f}=0.04) is formed. The reaction mixture is filtered and concentrated (≤40° C.) under reduced pressure to give a residue. Diluted with anhydrous DCM (500 mL, dried overnight with 4 Å molecular sieves (dried at 300° C. for 12 hrs)) and concentrate to give a residue and run Karl Fisher (KF) to check for water content. This is repeated 3 times with anhydrous DCM (500 mL) dilutions and concentration to give NAcegal-Linker-TMSOTf (205 g, 95.8% yield, TsOH salt) as a foamy white solid. ¹H NMR: δ 7.91 (d, J=9.03 Hz, 1H), 7.53-7.86 (m, 2H), 7.49 (d, J 8.03 Hz, 2H), 7.13 (d, J 8.03 Hz, 2H), 5.22 (d, J=3.26 Hz, 1H), 4.98 (dd, J=11.29, 3.26 Hz, 1H), 4.57 (d, J=8.53 Hz, 1H), 3.99-4.05 (m, 3H), 3.87-3.94 (m, 1H), 3.79-3.85 (m, 1H), 3.51-3.62 (m, 5H), 2.96 (br t, J 5.14 Hz, 2H), 2.29 (s, 3H), 2.10 (s, 3H), 2.00 (s, 3H), 1.89 (s, 3H), 1.78 (s, 3H).

[chemical structure]

[chemical structure]

### General Procedure for Preparation of Compound 5B

[chemical structure]

[0400] To a solution of Compound 4B (400 g, 1.67 mol, 1.00 eq) and NaOH (10 M, 16.7 mL, 0.10 eq) in THF (2.00 L) is added Compound 4B_2 (1.07 kg, 8.36 mol, 1.20 L, 5.00 eq), the mixture is stirred at 30° C. for 2 hrs. LCMS showed the desired MS is given. Five batches of solution are combined to one batch, then the mixture is diluted with water (6.00 L), extracted with ethyl acetate (3.00 L*3), the combined organic layer is washed with brine (3.00 L), dried over Na₂SO₄, filtered and concentrated under vacuum. The crude is purified by column chromatography (SiO₂, petroleum ether:ethyl acetate=100:1-10:1, R_{f}=0.5) to give Compound 5B (2.36 kg, 6.43 mol, 76.9% yield) as light yellow oil. HNMR: δ 7.31-7.36 (m, 5H), 5.38 (s, 1H), 5.11-5.16 (m, 2H), 3.75 (t, J=6.4 Hz), 3.54-3.62 (m, 6H), 3.39 (d, J=5.2 Hz), 2.61 (t, J=6.0 Hz).

### General procedure for preparation of 3-oxo-1-phenyl-2,7,10-trioxa-4-azatridecan-13-oic acid (Compound 2B below)

[chemical structure]

[0402] To a solution of Compound 5B (741 g, 2.02 mol, 1.00 eq) in DCM (2.80 L) is added TFA (1.43 kg, 12.5 mol, 928 mL, 6.22 eq), the mixture is stirred at 25° C. for 3 hrs. LCMS showed the desired MS is given. The mixture is diluted with DCM (5.00 L), washed with water (3.00 L*3), brine (2.00 L), the combined organic layer is dried over Na₂SO₄, filtered and concentrated under vacuum to give Compound 2B (1800 g, crude) as light yellow oil. HNMR: δ 9.46 (s, 5H), 7.27-7.34 (m, 5H), 6.50-6.65 (m, 1H), 5.71 (s, 1H), 5.10-5.15 (m, 2H), 3.68-3.70 (m, 14H), 3.58-3.61 (m, 6H), 3.39 (s, 2H), 2.55 (s, 6H), 2.44 (s, 2H).

### General Procedure for Preparation of Compound 3B

[chemical structure]

[0404] To a solution of Compound 2B (375 g, 999 mmol, 83.0% purity, 1.00 eq) in DCM (1.80 L) is added HATU (570 g, 1.50 mol, 1.50 eq) and DIEA (258 g, 2.00 mol, 348 mL, 2.00 eq) at 0° C., the mixture is stirred at 0° C. for 30 min, then Compound 1B (606 g, 1.20 mol, 1.20 eq) is added, the mixture is stirred at 25° C. for 1 hr. LCMS showed desired MS is given. The mixture is combined to one batch, then the mixture is diluted with DCM (5.00 L), washed with 1 N HCl aqueous solution (2.00 L*2), then the organic layer is washed with saturated Na₂CO₃ aqueous solution (2.00 L*2) and brine (2.00 L), the organic layer is dried over Na₂SO₄, filtered and concentrated under vacuum to give Compound 3B (3.88 kg, crude) as yellow oil.

### General Procedure for Preparation of TRIS-PEG2-CBZ

[chemical structure]

[0406] A solution of Compound 3B (775 g, 487 mmol, 50.3% purity, 1.00 eq) in HCl/dioxane (4 M, 2.91 L, 23.8 eq) is stirred at 25° C. for 2 hrs. LCMS showed the desired MS is given. The mixture is concentrated under vacuum to give a residue. Then the combined residue is diluted with DCM (5.00 L), adjusted to pH=8 with 2.5 M NaOH aqueous solution, and separated. The aqueous phase is extracted with DCM (3.00 L) again, then the aqueous solution is adjusted to pH=3 with 1 N HCl aqueous solution, then extracted with DCM (5.00 L*2), the combined organic layer is washed with brine (3.00 L), dried over Na₂SO₄, filtered and concentrated under vacuum. The crude is purified by column chromatography (SiO₂, DCM:MeOH=0:1-12:1, 0.1% HOAc, R_{f}=0.4). The residue is diluted with DCM (5.00 L), adjusted to pH=8 with 2.5 M NaOH aqueous solution, separated, the aqueous solution is extracted with DCM (3.00 L) again, then the aqueous solution is adjusted to pH=3 with 6 N HCl aqueous solution, extracted with DCM:MeOH=10:1 (5.00 L*2), the combined organic layer is washed with brine (2.00 L), dried over Na₂SO₄, filtered and concentrated under vacuum to give a residue. Then the residue is diluted with MeCN (5.00 L), concentrated under vacuum, repeat this procedure twice to remove water to give TRIS-PEG2-CBZ (1.25 kg, 1.91 mol, 78.1% yield, 95.8% purity) as light yellow oil. ¹HNMR: 400 MHz, MeOD, δ 7.30-7.35 (5H), 5.07 (s, 2H), 3.65-3.70 (m, 16H), 3.59 (s, 4H), 3.45 (t, J=5.6 Hz), 2.51 (t, J=6.0 Hz), 2.43 (t, 6.4 Hz).

[chemical structure]

[chemical structure]

[chemical structure]

[chemical structure]

### General Procedure for Preparation of Compound 3C

[chemical structure]

[0408] To a solution of Compound 1C (155 g, 245 mmol, 1.00 eq) in ACN (1500 mL) is added TBTU (260 g, 811 mmol, 3.30 eq), DIEA (209 g, 1.62 mol, 282 mL, 6.60 eq) and Compound 2C (492 g, 811 mmol, 3.30 eq, TsOH) at 0° C., the mixture is stirred at 15° C. for 16 hrs. LCMS showed the desired MS is given. The mixture is concentrated under vacuum to give a residue, then the mixture is diluted with DCM (2000 mL), washed with 1 N HCl aqueous solution (700 mL*2), then saturated NaHCO₃ aqueous solution (700 mL*2) and concentrated under vacuum. The crude is purified by column chromatography to give Compound 3C (304 g, 155 mmol, 63.1% yield, 96.0% purity) as a yellow solid.

### General Procedure for Preparation of Compound 4C

[chemical structure]

[0410] Two batches solution of Compound 3C (55.0 g, 29.2 mmol, 1.00 eq) in MeOH (1600 mL) is added Pd/C (6.60 g, 19.1 mmol, 10.0% purity) and TFA (3.34 g, 29.2 mmol, 2.17 mL, 1.00 eq), the mixture is degassed under vacuum and purged with H₂. The mixture is stirred under H₂ (15 psi) at 15° C. for 2 hours. LCMS showed the desired MS is given. The mixture is filtered and the filtrate is concentrated under vacuum to give Compound 4C (106 g, 54.8 mmol, 93.7% yield, 96.2% purity, TFA) as a white solid.

### General Procedure for Preparation of Compound 5C

[chemical structure]

[0412] Two batches in parallel. To a solution of EDCI (28.8 g, 150 mmol, 1.00 eq) in DCM (125 mL) is added compound 4a (25.0 g, 150 mmol, 1.00 eq) dropwise at 0° C., then the mixture is added to compound 4 (25.0 g, 150 mmol, 1.00 eq) in DCM (125 mL) at 0° C., then the mixture is stirred at 25° C. for 1 hr. TLC (Petroleum ether:Ethyl acetate=3:1, R_{f}=0.45) showed the reactant is consumed and one new spot is formed. The reaction mixture is diluted with DCM (100 mL) then washed with aq.NaHCO₃ (250 mL*1) and brine (250 mL), dried over Na₂SO₄, filtered and concentrated under reduced pressure to give a residue. The residue is purified by column chromatography (SiO₂, Petroleum ether:Ethyl acetate=100:1 to 3:1), TLC (SiO₂, Petroleum ether:Ethyl acetate=3:1), R_{f}=0.45, then concentrated under reduced pressure to give a residue. Compound 5C (57.0 g, 176 mmol, 58.4% yield, 96.9% purity) is obtained as colorless oil and confirmed ¹HNMR: EW33072-2-P1A, 400 MHz, DMSO δ 9.21 (s, 1H), 7.07-7.09 (m, 2H), 6.67-6.70 (m, 2H), 3.02-3.04 (m, 2H), 2.86-2.90 (m, 2H)

### General Procedure for Preparation of Compound 6

[chemical structure]

[0414] To a mixture of compound 3 (79.0 g, 41.0 mmol, 96.4% purity, 1.00 eq, TFA) and compound 6C (14.2 g, 43.8 mmol, 96.9% purity, 1.07 eq) in DCM (800 mL) is added TEA (16.6 g, 164 mmol, 22.8 mL, 4.00 eq) dropwise at 0° C., the mixture is stirred at 15° C. for 16 hrs. LCMS (EW33072-12-P1B, Rt=0.844 min) showed the desired mass is detected. The reaction mixture is diluted with DCM (400 mL) and washed with aq.NaHCO₃ (400 mL*1) and brine(400 mL*1), then the mixture is diluted with DCM (2.00 L) and washed with 0.7 M Na₂CO₃ (1000 mL*3) and brine(800 mL*3), dried over Na₂SO₄, filtered and concentrated under reduced pressure to give a residue. The residue is used to next step directly without purification. Compound 6 (80.0 g, crude) is obtained as white solid and confirmed via ¹HNMR: EW33072-12-P1A, 400 MHz, MeOD δ 7.02-7.04 (m, 2H), 6.68-6.70 (m, 2H), 5.34-5.35 (s, 3H), 5.07-5.08 (d, J=4.00 Hz, 3H), 4.62-4.64 (d, J=8.00 Hz, 3H), 3.71-4.16 (m, 16H), 3.31-3.70 (m, 44H), 2.80-2.83 (m, 2H), 2.68 (m, 2H), 2.46-2.47 (m, 10H), 2.14 (s, 9H), 2.03 (s, 9H), 1.94-1.95 (d, J=4.00 Hz, 18H).

### General Procedure for Preparation of TriGNal-TRIS-Peg2-Phosph 8c

[chemical structure]

[0416] Two batches are synthesized in parallel. To a solution of compound 6C (40.0 g, 21.1 mmol, 1.00 eq in DCM (600 mL) is added diisopropylammonium tetrazolide (3.62 g, 21.1 mmol, 1.00 eq) and compound 7c (6.37 g, 21.1 mmol, 6.71 mL, 1.00 eq) in DCM (8.00 mL) drop-wise, the mixture is stirred at 30° C. for 1 hr, then added compound 7c (3.18 g, 10.6 mmol, 3.35 mL, 0.50 eq) in DCM (8.00 mL) drop-wise, the mixture is stirred at 30° C. for 30 mins, then added compound 7c (3.18 g, 10.6 mmol, 3.35 mL, 0.50 eq) in DCM (8.00 mL) drop-wise, the mixture is stirred at 30° C. for 1.5 hrs. LCMS (EW33072-17-P1C1, Rt=0.921 min) showed the desired MS+1 is detected. LCMS (EW33072-17-P1C2, Rt=0.919 min) showed the desired MS+1 is detected. Two batches are combined for work-up. The mixture is diluted with DCM (1.20 L), washed with saturated NaHCO₃ aqueous solution (1.60 L*2), 3% DMF in H₂O (1.60 L*2), H₂O (1.60 L*3), brine (1.60 L), dried over Na₂SO₄, filtered and concentrated under reduced pressure to give a residue. The residue is purified by column chromatography (SiO₂, DCM: MeOH:TEA=100:3:2) TLC (SiO₂, DCM:MeOH=10:1, R_{f}=0.45), then concentrated under reduced pressure to give a residue. Compound 8C (76.0 g, 34.8 mmol, 82.5% yield, 96.0% purity) is obtained as white solid and confirmed via ¹HNMR: EW33072-19-P1C, 400 MHz, MeOD δ 7.13-7.15 (d, J=8.50 Hz, 2H), 6.95-6.97 (dd, J=8.38, 1.13 Hz, 2H), 5.34 (d, J=2.88 Hz, 3H), 0.09 (dd, J=11.26, 3.38 Hz, 3H), 4.64 (d, J=8.50 Hz, 3H), 3.99-4.20 (m, 12H), 3.88-3.98 (m, 5H), 3.66-3.83 (m, 20H), 3.51-3.65 (m, 17H), 3.33-3.50 (m, 9H), 2.87 (t, J=7.63 Hz, 2H), 2.76 (t J=5.94 Hz, 2H), 2.42-2.50 (m, 10H), 2.14 (s, 9H), 2.03 (s, 9H), 1.94-1.95 (d, J=6.13 Hz, 18H), 1.24-1.26 (d, J=6.75 Hz, 6H), 1.18-1.20 (d, J=6.75 Hz, 6H)

### Example 20: Modification Motif 1

[0417] An example MST1 siRNA includes a combination of the following modifications:
[0418] Position 9 (from 5′ to 3′) of the sense strand is 2′ F.
[0419] If position 9 is a pyrimidine then all purines in the Sense Strand are 2′OMe, and 1-5 pyrimidines between positions 5 and 11 are 2′ F provided that there are never three 2′F modifications in a row.
[0420] If position 9 is a purine then all pyrimidines in the Sense Strand are 2′OMe, and 1-5 purines between positions 5 and 11 are 2′ F provided that there are never three 2′F modifications in a row.
[0421] Antisense strand odd-numbered positions are 2′OMe and even-numbered positions are a mixture of 2′ F, 2′ OMe and 2′ deoxy.

### Example 21: Modification Motif 2

[0422] An example MST1 siRNA includes a combination of the following modifications:
[0423] Position 9 (from 5′ to 3′) of the sense strand is 2′ deoxy.
[0424] Sense strand positions 5, 7 and 8 are 2′ F.
[0425] All pyrimidines in positions 10-21 are 2′ OMe, and purines are a mixture of 2′ OMe and 2′ F. Alternatively, all purines in positions 10-21 are 2′ OMe and all pyrimidines in positions 10-21 are a mixture of 2′ OMe and 2′ F.
[0426] Antisense strand odd-numbered positions are 2′OMe and even-numbered positions are a mixture of 2′ F, 2′ OMe and 2′ deoxy.

[0427] While preferred embodiments of the present invention have been shown and described herein, it will be obvious to those skilled in the art that such embodiments are provided by way of example only. Numerous variations, changes, and substitutions will now occur to those skilled in the art without departing from the invention. It should be understood that various alternatives to the embodiments of the invention described herein may be employed in practicing the invention. It is intended that the following claims define the scope of the invention and that methods and compositions within the scope of these claims and their equivalents be covered thereby.

### IV. SEQUENCE INFORMATION

[0428] Some embodiments include one or more nucleic acid sequences in the following tables:

TABLE 33A
Sequence Information

| SEQ ID NO: | Description |
|---|---|
| 1-3024 | MST1 siRNA sense strand sequences |
| 3025-6048 | MST1 siRNA antisense strand sequences |
| 6049-6086 | Modified MST1 siRNA sense strand sequences |
| 6087-6124 | Modified MST1 siRNA antisense strand sequences |
| 6125-6162 | Alternatively modified MST1 siRNA |
| | sense strand sequences |
| 6163 | Full-length human MST1 mRNA sequence (Ensembl |
| | transcript ID: ENST00000449682.2) (human RNA) |
| 6164-6172 | Modification pattern 1S to 9S |
| 6173-6180 | Modification pattern 1AS to 8AS |
| 6181 | Modification pattern ASO1 |
| 6182-6184 | Examples of RGD peptide sequences |
| 6185 | Full-length human MST1 mRNA sequence (NCBI |
| | Reference Sequence: NM_020998.4) (human RNA) |
| 6186-6244 | Modified MST1 siRNA sense strand sequences |
| 6245-6303 | Modified MST1 siRNA antisense strand sequences |
| 6304-6316 | Placeholders |
| 6317-6318 | ETD01218 sense and antisense strand sequences |
| 6319 | Modification patterns 35S |
| 6320-6344 | Modification patterns 10S-34S |
| 6345-6357 | Modification patterns 9AS-21AS |
| 6358-6387 | Additional MST1 siRNA sense strand sequences |
| 6388-6417 | Additional MST1 siRNA antisense strand sequences |
| 6418-6476 | Example MST1 siRNA sense strand sequences |
| 6477-6535 | Example MST1 siRNA antisense strand sequences |

TABLE 33B
siRNA Sequences

| | SEQ | | SEQ | |
|---|---|---|---|---|
| | ID | sense strand | ID | antisense strand |
| siRNA Name | NO: | sequence (5′-3′) | NO: | sequence (5′-3′) |
| siRNA 1 | 1 | CAGCCUCCGCUAGGGGACC | 3025 | GGUCCCCUAGCGGAGGCUG |
| siRNA 2 | 2 | AGCCUCCGCUAGGGGACCC | 3026 | GGGUCCCCUAGCGGAGGCU |
| siRNA 3 | 3 | GCCUCCGCUAGGGGACCCC | 3027 | GGGGUCCCCUAGCGGAGGC |
| siRNA 4 | 4 | CCUCCGCUAGGGGACCCCC | 3028 | GGGGGUCCCCUAGCGGAGG |
| siRNA 5 | 5 | CUCCGCUAGGGGACCCCCU | 3029 | AGGGGGUCCCCUAGCGGAG |
| siRNA 6 | 6 | UCCGCUAGGGGACCCCCUC | 3030 | GAGGGGGUCCCCUAGCGGA |
| siRNA 7 | 7 | CCGCUAGGGGACCCCCUCC | 3031 | GGAGGGGGUCCCCUAGCGG |
| siRNA 8 | 8 | CGCUAGGGGACCCCCUCCA | 3032 | UGGAGGGGGUCCCCUAGCG |
| siRNA 9 | 9 | GCUAGGGGACCCCCUCCAU | 3033 | AUGGAGGGGGUCCCCUAGC |
| siRNA 10 | 10 | CUAGGGGACCCCCUCCAUG | 3034 | CAUGGAGGGGGUCCCCUAG |
| siRNA 11 | 11 | UAGGGGACCCCCUCCAUGG | 3035 | CCAUGGAGGGGGUCCCCUA |
| siRNA 12 | 12 | AGGGGACCCCCUCCAUGGC | 3036 | GCCAUGGAGGGGGUCCCCU |
| siRNA 13 | 13 | GGGGACCCCCUCCAUGGCU | 3037 | AGCCAUGGAGGGGGUCCCC |
| siRNA 14 | 14 | GGGACCCCCUCCAUGGCUU | 3038 | AAGCCAUGGAGGGGGUCCC |
| siRNA 15 | 15 | GGACCCCCUCCAUGGCUUC | 3039 | GAAGCCAUGGAGGGGGUCC |
| siRNA 16 | 16 | GACCCCCUCCAUGGCUUCC | 3040 | GGAAGCCAUGGAGGGGGUC |
| siRNA 17 | 17 | ACCCCCUCCAUGGCUUCCC | 3041 | GGGAAGCCAUGGAGGGGGU |
| siRNA 18 | 18 | CCCCCUCCAUGGCUUCCCA | 3042 | UGGGAAGCCAUGGAGGGGG |
| siRNA 19 | 19 | CCCCUCCAUGGCUUCCCAC | 3043 | GUGGGAAGCCAUGGAGGGG |
| siRNA 20 | 20 | CCCUCCAUGGCUUCCCACC | 3044 | GGUGGGAAGCCAUGGAGGG |
| siRNA 21 | 21 | CCUCCAUGGCUUCCCACCG | 3045 | CGGUGGGAAGCCAUGGAGG |
| siRNA 22 | 22 | CUCCAUGGCUUCCCACCGG | 3046 | CCGGUGGGAAGCCAUGGAG |
| siRNA 23 | 23 | UCCAUGGCUUCCCACCGGG | 3047 | CCCGGUGGGAAGCCAUGGA |
| siRNA 24 | 24 | CCAUGGCUUCCCACCGGGU | 3048 | ACCCGGUGGGAAGCCAUGG |
| siRNA 25 | 25 | CAUGGCUUCCCACCGGGUU | 3049 | AACCCGGUGGGAAGCCAUG |
| siRNA 26 | 26 | AUGGCUUCCCACCGGGUUG | 3050 | CAACCCGGUGGGAAGCCAU |
| siRNA 27 | 27 | UGGCUUCCCACCGGGUUGU | 3051 | ACAACCCGGUGGGAAGCCA |
| siRNA 28 | 28 | GGCUUCCCACCGGGUUGUU | 3052 | AACAACCCGGUGGGAAGCC |
| siRNA 29 | 29 | GCUUCCCACCGGGUUGUUC | 3053 | GAACAACCCGGUGGGAAGC |
| siRNA 30 | 30 | CUUCCCACCGGGUUGUUCC | 3054 | GGAACAACCCGGUGGGAAG |
| siRNA 31 | 31 | UUCCCACCGGGUUGUUCCA | 3055 | UGGAACAACCCGGUGGGAA |
| siRNA 32 | 32 | UCCCACCGGGUUGUUCCAG | 3056 | CUGGAACAACCCGGUGGGA |
| siRNA 33 | 33 | CCCACCGGGUUGUUCCAGG | 3057 | CCUGGAACAACCCGGUGGG |
| siRNA 34 | 34 | CCACCGGGUUGUUCCAGGC | 3058 | GCCUGGAACAACCCGGUGG |
| siRNA 35 | 35 | CACCGGGUUGUUCCAGGCC | 3059 | GGCCUGGAACAACCCGGUG |
| siRNA 36 | 36 | ACCGGGUUGUUCCAGGCCU | 3060 | AGGCCUGGAACAACCCGGU |
| siRNA 37 | 37 | CCGGGUUGUUCCAGGCCUC | 3061 | GAGGCCUGGAACAACCCGG |
| siRNA 38 | 38 | CGGGUUGUUCCAGGCCUCA | 3062 | UGAGGCCUGGAACAACCCG |
| siRNA 39 | 39 | GGGUUGUUCCAGGCCUCAG | 3063 | CUGAGGCCUGGAACAACCC |
| siRNA 40 | 40 | GGUUGUUCCAGGCCUCAGC | 3064 | GCUGAGGCCUGGAACAACC |
| siRNA 41 | 41 | GUUGUUCCAGGCCUCAGCU | 3065 | AGCUGAGGCCUGGAACAAC |
| siRNA 42 | 42 | UUGUUCCAGGCCUCAGCUU | 3066 | AAGCUGAGGCCUGGAACAA |
| siRNA 43 | 43 | UGUUCCAGGCCUCAGCUUC | 3067 | GAAGCUGAGGCCUGGAACA |
| siRNA 44 | 44 | GUUCCAGGCCUCAGCUUCG | 3068 | CGAAGCUGAGGCCUGGAAC |
| siRNA 45 | 45 | UUCCAGGCCUCAGCUUCGC | 3069 | GCGAAGCUGAGGCCUGGAA |
| siRNA 46 | 46 | UCCAGGCCUCAGCUUCGCC | 3070 | GGCGAAGCUGAGGCCUGGA |
| siRNA 47 | 47 | CCAGGCCUCAGCUUCGCCG | 3071 | CGGCGAAGCUGAGGCCUGG |
| siRNA 48 | 48 | CAGGCCUCAGCUUCGCCGA | 3072 | UCGGCGAAGCUGAGGCCUG |
| siRNA 49 | 49 | AGGCCUCAGCUUCGCCGAA | 3073 | UUCGGCGAAGCUGAGGCCU |
| siRNA 50 | 50 | GGCCUCAGCUUCGCCGAAA | 3074 | UUUCGGCGAAGCUGAGGCC |
| siRNA 51 | 51 | GCCUCAGCUUCGCCGAAAG | 3075 | CUUUCGGCGAAGCUGAGGC |
| siRNA 52 | 52 | CCUCAGCUUCGCCGAAAGG | 3076 | CCUUUCGGCGAAGCUGAGG |
| siRNA 53 | 53 | CUCAGCUUCGCCGAAAGGC | 3077 | GCCUUUCGGCGAAGCUGAG |
| siRNA 54 | 54 | UCAGCUUCGCCGAAAGGCC | 3078 | GGCCUUUCGGCGAAGCUGA |
| siRNA 55 | 55 | CAGCUUCGCCGAAAGGCCU | 3079 | AGGCCUUUCGGCGAAGCUG |
| siRNA 56 | 56 | AGCUUCGCCGAAAGGCCUC | 3080 | GAGGCCUUUCGGCGAAGCU |
| siRNA 57 | 57 | GCUUCGCCGAAAGGCCUCA | 3081 | UGAGGCCUUUCGGCGAAGC |
| siRNA 58 | 58 | CUUCGCCGAAAGGCCUCAC | 3082 | GUGAGGCCUUUCGGCGAAG |
| siRNA 59 | 59 | UUCGCCGAAAGGCCUCACC | 3083 | GGUGAGGCCUUUCGGCGAA |
| siRNA 60 | 60 | UCGCCGAAAGGCCUCACCA | 3084 | UGGUGAGGCCUUUCGGCGA |
| siRNA 61 | 61 | CGCCGAAAGGCCUCACCAC | 3085 | GUGGUGAGGCCUUUCGGCG |
| siRNA 62 | 62 | GCCGAAAGGCCUCACCACC | 3086 | GGUGGUGAGGCCUUUCGGC |
| siRNA 63 | 63 | CCGAAAGGCCUCACCACCU | 3087 | AGGUGGUGAGGCCUUUCGG |
| siRNA 64 | 64 | CGAAAGGCCUCACCACCUC | 3088 | GAGGUGGUGAGGCCUUUCG |
| siRNA 65 | 65 | GAAAGGCCUCACCACCUCC | 3089 | GGAGGUGGUGAGGCCUUUC |
| siRNA 66 | 66 | AAAGGCCUCACCACCUCCG | 3090 | CGGAGGUGGUGAGGCCUUU |
| siRNA 67 | 67 | AAGGCCUCACCACCUCCGA | 3091 | UCGGAGGUGGUGAGGCCUU |
| siRNA 68 | 68 | AGGCCUCACCACCUCCGAC | 3092 | GUCGGAGGUGGUGAGGCCU |
| siRNA 69 | 69 | GGCCUCACCACCUCCGACC | 3093 | GGUCGGAGGUGGUGAGGCC |
| siRNA 70 | 70 | GCCUCACCACCUCCGACCU | 3094 | AGGUCGGAGGUGGUGAGGC |
| siRNA 71 | 71 | CCUCACCACCUCCGACCUC | 3095 | GAGGUCGGAGGUGGUGAGG |
| siRNA 72 | 72 | CUCACCACCUCCGACCUCC | 3096 | GGAGGUCGGAGGUGGUGAG |
| siRNA 73 | 73 | UCACCACCUCCGACCUCCG | 3097 | CGGAGGUCGGAGGUGGUGA |
| siRNA 74 | 74 | CACCACCUCCGACCUCCGC | 3098 | GCGGAGGUCGGAGGUGGUG |
| siRNA 75 | 75 | ACCACCUCCGACCUCCGCC | 3099 | GGCGGAGGUCGGAGGUGGU |
| siRNA 76 | 76 | CCACCUCCGACCUCCGCCU | 3100 | AGGCGGAGGUCGGAGGUGG |
| siRNA 77 | 77 | CACCUCCGACCUCCGCCUG | 3101 | CAGGCGGAGGUCGGAGGUG |
| siRNA 78 | 78 | ACCUCCGACCUCCGCCUGC | 3102 | GCAGGCGGAGGUCGGAGGU |
| siRNA 79 | 79 | CCUCCGACCUCCGCCUGCU | 3103 | AGCAGGCGGAGGUCGGAGG |
| siRNA 80 | 80 | CUCCGACCUCCGCCUGCUC | 3104 | GAGCAGGCGGAGGUCGGAG |
| siRNA 81 | 81 | UCCGACCUCCGCCUGCUCU | 3105 | AGAGCAGGCGGAGGUCGGA |
| siRNA 82 | 82 | CCGACCUCCGCCUGCUCUG | 3106 | CAGAGCAGGCGGAGGUCGG |
| siRNA 83 | 83 | CGACCUCCGCCUGCUCUGG | 3107 | CCAGAGCAGGCGGAGGUCG |
| siRNA 84 | 84 | GACCUCCGCCUGCUCUGGG | 3108 | CCCAGAGCAGGCGGAGGUC |
| siRNA 85 | 85 | ACCUCCGCCUGCUCUGGGG | 3109 | CCCCAGAGCAGGCGGAGGU |
| siRNA 86 | 86 | CCUCCGCCUGCUCUGGGGA | 3110 | UCCCCAGAGCAGGCGGAGG |
| siRNA 87 | 87 | CUCCGCCUGCUCUGGGGAU | 3111 | AUCCCCAGAGCAGGCGGAG |
| siRNA 88 | 88 | UCCGCCUGCUCUGGGGAUG | 3112 | CAUCCCCAGAGCAGGCGGA |
| siRNA 89 | 89 | CCGCCUGCUCUGGGGAUGC | 3113 | GCAUCCCCAGAGCAGGCGG |
| siRNA 90 | 90 | CGCCUGCUCUGGGGAUGCU | 3114 | AGCAUCCCCAGAGCAGGCG |
| siRNA 91 | 91 | GCCUGCUCUGGGGAUGCUC | 3115 | GAGCAUCCCCAGAGCAGGC |
| siRNA 92 | 92 | CCUGCUCUGGGGAUGCUCC | 3116 | GGAGCAUCCCCAGAGCAGG |
| siRNA 93 | 93 | CUGCUCUGGGGAUGCUCCC | 3117 | GGGAGCAUCCCCAGAGCAG |
| siRNA 94 | 94 | UGCUCUGGGGAUGCUCCCA | 3118 | UGGGAGCAUCCCCAGAGCA |
| siRNA 95 | 95 | GCUCUGGGGAUGCUCCCAG | 3119 | CUGGGAGCAUCCCCAGAGC |
| siRNA 96 | 96 | CUCUGGGGAUGCUCCCAGC | 3120 | GCUGGGAGCAUCCCCAGAG |
| siRNA 97 | 97 | UCUGGGGAUGCUCCCAGCC | 3121 | GGCUGGGAGCAUCCCCAGA |
| siRNA 98 | 98 | CUGGGGAUGCUCCCAGCCC | 3122 | GGGCUGGGAGCAUCCCCAG |
| siRNA 99 | 99 | UGGGGAUGCUCCCAGCCCU | 3123 | AGGGCUGGGAGCAUCCCCA |
| siRNA 100 | 100 | GGGGAUGCUCCCAGCCCUG | 3124 | CAGGGCUGGGAGCAUCCCC |
| siRNA 101 | 101 | GGGAUGCUCCCAGCCCUGC | 3125 | GCAGGGCUGGGAGCAUCCC |
| siRNA 102 | 102 | GGAUGCUCCCAGCCCUGCU | 3126 | AGCAGGGCUGGGAGCAUCC |
| siRNA 103 | 103 | GAUGCUCCCAGCCCUGCUG | 3127 | CAGCAGGGCUGGGAGCAUC |
| siRNA 104 | 104 | AUGCUCCCAGCCCUGCUGC | 3128 | GCAGCAGGGCUGGGAGCAU |
| siRNA 105 | 105 | UGCUCCCAGCCCUGCUGCG | 3129 | CGCAGCAGGGCUGGGAGCA |
| siRNA 106 | 106 | GCUCCCAGCCCUGCUGCGG | 3130 | CCGCAGCAGGGCUGGGAGC |
| siRNA 107 | 107 | CUCCCAGCCCUGCUGCGGC | 3131 | GCCGCAGCAGGGCUGGGAG |
| siRNA 108 | 108 | UCCCAGCCCUGCUGCGGCA | 3132 | UGCCGCAGCAGGGCUGGGA |
| siRNA 109 | 109 | CCCAGCCCUGCUGCGGCAG | 3133 | CUGCCGCAGCAGGGCUGGG |
| siRNA 110 | 110 | CCAGCCCUGCUGCGGCAGA | 3134 | UCUGCCGCAGCAGGGCUGG |
| siRNA 111 | 111 | CAGCCCUGCUGCGGCAGAA | 3135 | UUCUGCCGCAGCAGGGCUG |
| siRNA 112 | 112 | AGCCCUGCUGCGGCAGAAC | 3136 | GUUCUGCCGCAGCAGGGCU |
| siRNA 113 | 113 | GCCCUGCUGCGGCAGAACG | 3137 | CGUUCUGCCGCAGCAGGGC |
| siRNA 114 | 114 | CCCUGCUGCGGCAGAACGC | 3138 | GCGUUCUGCCGCAGCAGGG |
| siRNA 115 | 115 | CCUGCUGCGGCAGAACGCG | 3139 | CGCGUUCUGCCGCAGCAGG |
| siRNA 116 | 116 | CUGCUGCGGCAGAACGCGA | 3140 | UCGCGUUCUGCCGCAGCAG |
| siRNA 117 | 117 | UGCUGCGGCAGAACGCGAC | 3141 | GUCGCGUUCUGCCGCAGCA |
| siRNA 118 | 118 | GCUGCGGCAGAACGCGACA | 3142 | UGUCGCGUUCUGCCGCAGC |
| siRNA 119 | 119 | CUGCGGCAGAACGCGACAU | 3143 | AUGUCGCGUUCUGCCGCAG |
| siRNA 120 | 120 | UGCGGCAGAACGCGACAUG | 3144 | CAUGUCGCGUUCUGCCGCA |
| siRNA 121 | 121 | GCGGCAGAACGCGACAUGC | 3145 | GCAUGUCGCGUUCUGCCGC |
| siRNA 122 | 122 | CGGCAGAACGCGACAUGCU | 3146 | AGCAUGUCGCGUUCUGCCG |
| siRNA 123 | 123 | GGCAGAACGCGACAUGCUA | 3147 | UAGCAUGUCGCGUUCUGCC |
| siRNA 124 | 124 | GCAGAACGCGACAUGCUAA | 3148 | UUAGCAUGUCGCGUUCUGC |
| siRNA 125 | 125 | CAGAACGCGACAUGCUAAC | 3149 | GUUAGCAUGUCGCGUUCUG |
| siRNA 126 | 126 | AGAACGCGACAUGCUAACC | 3150 | GGUUAGCAUGUCGCGUUCU |
| siRNA 127 | 127 | GAACGCGACAUGCUAACCG | 3151 | CGGUUAGCAUGUCGCGUUC |
| siRNA 128 | 128 | AACGCGACAUGCUAACCGG | 3152 | CCGGUUAGCAUGUCGCGUU |
| siRNA 129 | 129 | ACGCGACAUGCUAACCGGA | 3153 | UCCGGUUAGCAUGUCGCGU |
| siRNA 130 | 130 | CGCGACAUGCUAACCGGAA | 3154 | UUCCGGUUAGCAUGUCGCG |
| siRNA 131 | 131 | GCGACAUGCUAACCGGAAU | 3155 | AUUCCGGUUAGCAUGUCGC |
| siRNA 132 | 132 | CGACAUGCUAACCGGAAUC | 3156 | GAUUCCGGUUAGCAUGUCG |
| siRNA 133 | 133 | GACAUGCUAACCGGAAUCC | 3157 | GGAUUCCGGUUAGCAUGUC |
| siRNA 134 | 134 | ACAUGCUAACCGGAAUCCC | 3158 | GGGAUUCCGGUUAGCAUGU |
| siRNA 135 | 135 | CAUGCUAACCGGAAUCCCU | 3159 | AGGGAUUCCGGUUAGCAUG |
| siRNA 136 | 136 | AUGCUAACCGGAAUCCCUA | 3160 | UAGGGAUUCCGGUUAGCAU |
| siRNA 137 | 137 | UGCUAACCGGAAUCCCUAG | 3161 | CUAGGGAUUCCGGUUAGCA |
| siRNA 138 | 138 | GCUAACCGGAAUCCCUAGG | 3162 | CCUAGGGAUUCCGGUUAGC |
| siRNA 139 | 139 | CUAACCGGAAUCCCUAGGC | 3163 | GCCUAGGGAUUCCGGUUAG |
| siRNA 140 | 140 | UAACCGGAAUCCCUAGGCC | 3164 | GGCCUAGGGAUUCCGGUUA |
| siRNA 141 | 141 | AACCGGAAUCCCUAGGCCG | 3165 | CGGCCUAGGGAUUCCGGUU |
| siRNA 142 | 142 | ACCGGAAUCCCUAGGCCGC | 3166 | GCGGCCUAGGGAUUCCGGU |
| siRNA 143 | 143 | CCGGAAUCCCUAGGCCGCC | 3167 | GGCGGCCUAGGGAUUCCGG |
| siRNA 144 | 144 | CGGAAUCCCUAGGCCGCCU | 3168 | AGGCGGCCUAGGGAUUCCG |
| siRNA 145 | 145 | GGAAUCCCUAGGCCGCCUG | 3169 | CAGGCGGCCUAGGGAUUCC |
| siRNA 146 | 146 | GAAUCCCUAGGCCGCCUGU | 3170 | ACAGGCGGCCUAGGGAUUC |
| siRNA 147 | 147 | AAUCCCUAGGCCGCCUGUC | 3171 | GACAGGCGGCCUAGGGAUU |
| siRNA 148 | 148 | AUCCCUAGGCCGCCUGUCU | 3172 | AGACAGGCGGCCUAGGGAU |
| siRNA 149 | 149 | UCCCUAGGCCGCCUGUCUC | 3173 | GAGACAGGCGGCCUAGGGA |
| siRNA 150 | 150 | CCCUAGGCCGCCUGUCUCC | 3174 | GGAGACAGGCGGCCUAGGG |
| siRNA 151 | 151 | CCUAGGCCGCCUGUCUCCU | 3175 | AGGAGACAGGCGGCCUAGG |
| siRNA 152 | 152 | CUAGGCCGCCUGUCUCCUA | 3176 | UAGGAGACAGGCGGCCUAG |
| siRNA 153 | 153 | UAGGCCGCCUGUCUCCUAC | 3177 | GUAGGAGACAGGCGGCCUA |
| siRNA 154 | 154 | AGGCCGCCUGUCUCCUACC | 3178 | GGUAGGAGACAGGCGGCCU |
| siRNA 155 | 155 | GGCCGCCUGUCUCCUACCC | 3179 | GGGUAGGAGACAGGCGGCC |
| siRNA 156 | 156 | GCCGCCUGUCUCCUACCCA | 3180 | UGGGUAGGAGACAGGCGGC |
| siRNA 157 | 157 | CCGCCUGUCUCCUACCCAU | 3181 | AUGGGUAGGAGACAGGCGG |
| siRNA 158 | 158 | CGCCUGUCUCCUACCCAUA | 3182 | UAUGGGUAGGAGACAGGCG |
| siRNA 159 | 159 | GCCUGUCUCCUACCCAUAC | 3183 | GUAUGGGUAGGAGACAGGC |
| siRNA 160 | 160 | CCUGUCUCCUACCCAUACU | 3184 | AGUAUGGGUAGGAGACAGG |
| siRNA 161 | 161 | CUGUCUCCUACCCAUACUU | 3185 | AAGUAUGGGUAGGAGACAG |
| siRNA 162 | 162 | UGUCUCCUACCCAUACUUA | 3186 | UAAGUAUGGGUAGGAGACA |
| siRNA 163 | 163 | GUCUCCUACCCAUACUUAG | 3187 | CUAAGUAUGGGUAGGAGAC |
| siRNA 164 | 164 | UCUCCUACCCAUACUUAGA | 3188 | UCUAAGUAUGGGUAGGAGA |
| siRNA 165 | 165 | CUCCUACCCAUACUUAGAG | 3189 | CUCUAAGUAUGGGUAGGAG |
| siRNA 166 | 166 | UCCUACCCAUACUUAGAGG | 3190 | CCUCUAAGUAUGGGUAGGA |
| siRNA 167 | 167 | CCUACCCAUACUUAGAGGC | 3191 | GCCUCUAAGUAUGGGUAGG |
| siRNA 168 | 168 | CUACCCAUACUUAGAGGCC | 3192 | GGCCUCUAAGUAUGGGUAG |
| siRNA 169 | 169 | UACCCAUACUUAGAGGCCC | 3193 | GGGCCUCUAAGUAUGGGUA |
| siRNA 170 | 170 | ACCCAUACUUAGAGGCCCC | 3194 | GGGGCCUCUAAGUAUGGGU |
| siRNA 171 | 171 | CCCAUACUUAGAGGCCCCG | 3195 | CGGGGCCUCUAAGUAUGGG |
| siRNA 172 | 172 | CCAUACUUAGAGGCCCCGC | 3196 | GCGGGGCCUCUAAGUAUGG |
| siRNA 173 | 173 | CAUACUUAGAGGCCCCGCU | 3197 | AGCGGGGCCUCUAAGUAUG |
| siRNA 174 | 174 | AUACUUAGAGGCCCCGCUC | 3198 | GAGCGGGGCCUCUAAGUAU |
| siRNA 175 | 175 | UACUUAGAGGCCCCGCUCA | 3199 | UGAGCGGGGCCUCUAAGUA |
| siRNA 176 | 176 | ACUUAGAGGCCCCGCUCAG | 3200 | CUGAGCGGGGCCUCUAAGU |
| siRNA 177 | 177 | CUUAGAGGCCCCGCUCAGA | 3201 | UCUGAGCGGGGCCUCUAAG |
| siRNA 178 | 178 | UUAGAGGCCCCGCUCAGAC | 3202 | GUCUGAGCGGGGCCUCUAA |
| siRNA 179 | 179 | UAGAGGCCCCGCUCAGACG | 3203 | CGUCUGAGCGGGGCCUCUA |
| siRNA 180 | 180 | AGAGGCCCCGCUCAGACGG | 3204 | CCGUCUGAGCGGGGCCUCU |
| siRNA 181 | 181 | GAGGCCCCGCUCAGACGGU | 3205 | ACCGUCUGAGCGGGGCCUC |
| siRNA 182 | 182 | AGGCCCCGCUCAGACGGUC | 3206 | GACCGUCUGAGCGGGGCCU |
| siRNA 183 | 183 | GGCCCCGCUCAGACGGUCC | 3207 | GGACCGUCUGAGCGGGGCC |
| siRNA 184 | 184 | GCCCCGCUCAGACGGUCCU | 3208 | AGGACCGUCUGAGCGGGGC |
| siRNA 185 | 185 | CCCCGCUCAGACGGUCCUU | 3209 | AAGGACCGUCUGAGCGGGG |
| siRNA 186 | 186 | CCCGCUCAGACGGUCCUUA | 3210 | UAAGGACCGUCUGAGCGGG |
| siRNA 187 | 187 | CCGCUCAGACGGUCCUUAA | 3211 | UUAAGGACCGUCUGAGCGG |
| siRNA 188 | 188 | CGCUCAGACGGUCCUUAAA | 3212 | UUUAAGGACCGUCUGAGCG |
| siRNA 189 | 189 | GCUCAGACGGUCCUUAAAA | 3213 | UUUUAAGGACCGUCUGAGC |
| siRNA 190 | 190 | CUCAGACGGUCCUUAAAAC | 3214 | GUUUUAAGGACCGUCUGAG |
| siRNA 191 | 191 | UCAGACGGUCCUUAAAACG | 3215 | CGUUUUAAGGACCGUCUGA |
| siRNA 192 | 192 | CAGACGGUCCUUAAAACGU | 3216 | ACGUUUUAAGGACCGUCUG |
| siRNA 193 | 193 | AGACGGUCCUUAAAACGUC | 3217 | GACGUUUUAAGGACCGUCU |
| siRNA 194 | 194 | GACGGUCCUUAAAACGUCU | 3218 | AGACGUUUUAAGGACCGUC |
| siRNA 195 | 195 | ACGGUCCUUAAAACGUCUG | 3219 | CAGACGUUUUAAGGACCGU |
| siRNA 196 | 196 | CGGUCCUUAAAACGUCUGA | 3220 | UCAGACGUUUUAAGGACCG |
| siRNA 197 | 197 | GGUCCUUAAAACGUCUGAA | 3221 | UUCAGACGUUUUAAGGACC |
| siRNA 198 | 198 | GUCCUUAAAACGUCUGAAA | 3222 | UUUCAGACGUUUUAAGGAC |
| siRNA 199 | 199 | UCCUUAAAACGUCUGAAAG | 3223 | CUUUCAGACGUUUUAAGGA |
| siRNA 200 | 200 | CCUUAAAACGUCUGAAAGG | 3224 | CCUUUCAGACGUUUUAAGG |
| siRNA 201 | 201 | CUUAAAACGUCUGAAAGGC | 3225 | GCCUUUCAGACGUUUUAAG |
| siRNA 202 | 202 | UUAAAACGUCUGAAAGGCC | 3226 | GGCCUUUCAGACGUUUUAA |
| siRNA 203 | 203 | UAAAACGUCUGAAAGGCCG | 3227 | CGGCCUUUCAGACGUUUUA |
| siRNA 204 | 204 | AAAACGUCUGAAAGGCCGU | 3228 | ACGGCCUUUCAGACGUUUU |
| siRNA 205 | 205 | AAACGUCUGAAAGGCCGUU | 3229 | AACGGCCUUUCAGACGUUU |
| siRNA 206 | 206 | AACGUCUGAAAGGCCGUUC | 3230 | GAACGGCCUUUCAGACGUU |
| siRNA 207 | 207 | ACGUCUGAAAGGCCGUUCC | 3231 | GGAACGGCCUUUCAGACGU |
| siRNA 208 | 208 | CGUCUGAAAGGCCGUUCCU | 3232 | AGGAACGGCCUUUCAGACG |
| siRNA 209 | 209 | GUCUGAAAGGCCGUUCCUG | 3233 | CAGGAACGGCCUUUCAGAC |
| siRNA 210 | 210 | UCUGAAAGGCCGUUCCUGC | 3234 | GCAGGAACGGCCUUUCAGA |
| siRNA 211 | 211 | CUGAAAGGCCGUUCCUGCC | 3235 | GGCAGGAACGGCCUUUCAG |
| siRNA 212 | 212 | UGAAAGGCCGUUCCUGCCA | 3236 | UGGCAGGAACGGCCUUUCA |
| siRNA 213 | 213 | GAAAGGCCGUUCCUGCCAG | 3237 | CUGGCAGGAACGGCCUUUC |
| siRNA 214 | 214 | AAAGGCCGUUCCUGCCAGA | 3238 | UCUGGCAGGAACGGCCUUU |
| siRNA 215 | 215 | AAGGCCGUUCCUGCCAGAG | 3239 | CUCUGGCAGGAACGGCCUU |
| siRNA 216 | 216 | AGGCCGUUCCUGCCAGAGU | 3240 | ACUCUGGCAGGAACGGCCU |
| siRNA 217 | 217 | GGCCGUUCCUGCCAGAGUC | 3241 | GACUCUGGCAGGAACGGCC |
| siRNA 218 | 218 | GCCGUUCCUGCCAGAGUCC | 3242 | GGACUCUGGCAGGAACGGC |
| siRNA 219 | 219 | CCGUUCCUGCCAGAGUCCC | 3243 | GGGACUCUGGCAGGAACGG |
| siRNA 220 | 220 | CGUUCCUGCCAGAGUCCCU | 3244 | AGGGACUCUGGCAGGAACG |
| siRNA 221 | 221 | GUUCCUGCCAGAGUCCCUG | 3245 | CAGGGACUCUGGCAGGAAC |
| siRNA 222 | 222 | UUCCUGCCAGAGUCCCUGC | 3246 | GCAGGGACUCUGGCAGGAA |
| siRNA 223 | 223 | UCCUGCCAGAGUCCCUGCU | 3247 | AGCAGGGACUCUGGCAGGA |
| siRNA 224 | 224 | CCUGCCAGAGUCCCUGCUA | 3248 | UAGCAGGGACUCUGGCAGG |
| siRNA 225 | 225 | CUGCCAGAGUCCCUGCUAC | 3249 | GUAGCAGGGACUCUGGCAG |
| siRNA 226 | 226 | UGCCAGAGUCCCUGCUACC | 3250 | GGUAGCAGGGACUCUGGCA |
| siRNA 227 | 227 | GCCAGAGUCCCUGCUACCU | 3251 | AGGUAGCAGGGACUCUGGC |
| siRNA 228 | 228 | CCAGAGUCCCUGCUACCUG | 3252 | CAGGUAGCAGGGACUCUGG |
| siRNA 229 | 229 | CAGAGUCCCUGCUACCUGU | 3253 | ACAGGUAGCAGGGACUCUG |
| siRNA 230 | 230 | AGAGUCCCUGCUACCUGUU | 3254 | AACAGGUAGCAGGGACUCU |
| siRNA 231 | 231 | GAGUCCCUGCUACCUGUUA | 3255 | UAACAGGUAGCAGGGACUC |
| siRNA 232 | 232 | AGUCCCUGCUACCUGUUAC | 3256 | GUAACAGGUAGCAGGGACU |
| siRNA 233 | 233 | GUCCCUGCUACCUGUUACC | 3257 | GGUAACAGGUAGCAGGGAC |
| siRNA 234 | 234 | UCCCUGCUACCUGUUACCU | 3258 | AGGUAACAGGUAGCAGGGA |
| siRNA 235 | 235 | CCCUGCUACCUGUUACCUC | 3259 | GAGGUAACAGGUAGCAGGG |
| siRNA 236 | 236 | CCUGCUACCUGUUACCUCC | 3260 | GGAGGUAACAGGUAGCAGG |
| siRNA 237 | 237 | CUGCUACCUGUUACCUCCA | 3261 | UGGAGGUAACAGGUAGCAG |
| siRNA 238 | 238 | UGCUACCUGUUACCUCCAC | 3262 | GUGGAGGUAACAGGUAGCA |
| siRNA 239 | 239 | GCUACCUGUUACCUCCACC | 3263 | GGUGGAGGUAACAGGUAGC |
| siRNA 240 | 240 | CUACCUGUUACCUCCACCC | 3264 | GGGUGGAGGUAACAGGUAG |
| siRNA 241 | 241 | UACCUGUUACCUCCACCCC | 3265 | GGGGUGGAGGUAACAGGUA |
| siRNA 242 | 242 | ACCUGUUACCUCCACCCCU | 3266 | AGGGGUGGAGGUAACAGGU |
| siRNA 243 | 243 | CCUGUUACCUCCACCCCUA | 3267 | UAGGGGUGGAGGUAACAGG |
| siRNA 244 | 244 | CUGUUACCUCCACCCCUAU | 3268 | AUAGGGGUGGAGGUAACAG |
| siRNA 245 | 245 | UGUUACCUCCACCCCUAUU | 3269 | AAUAGGGGUGGAGGUAACA |
| siRNA 246 | 246 | GUUACCUCCACCCCUAUUU | 3270 | AAAUAGGGGUGGAGGUAAC |
| siRNA 247 | 247 | UUACCUCCACCCCUAUUUA | 3271 | UAAAUAGGGGUGGAGGUAA |
| siRNA 248 | 248 | UACCUCCACCCCUAUUUAG | 3272 | CUAAAUAGGGGUGGAGGUA |
| siRNA 249 | 249 | ACCUCCACCCCUAUUUAGU | 3273 | ACUAAAUAGGGGUGGAGGU |
| siRNA 250 | 250 | CCUCCACCCCUAUUUAGUC | 3274 | GACUAAAUAGGGGUGGAGG |
| siRNA 251 | 251 | CUCCACCCCUAUUUAGUCC | 3275 | GGACUAAAUAGGGGUGGAG |
| siRNA 252 | 252 | UCCACCCCUAUUUAGUCCU | 3276 | AGGACUAAAUAGGGGUGGA |
| siRNA 253 | 253 | CCACCCCUAUUUAGUCCUA | 3277 | UAGGACUAAAUAGGGGUGG |
| siRNA 254 | 254 | CACCCCUAUUUAGUCCUAG | 3278 | CUAGGACUAAAUAGGGGUG |
| siRNA 255 | 255 | ACCCCUAUUUAGUCCUAGU | 3279 | ACUAGGACUAAAUAGGGGU |
| siRNA 256 | 256 | CCCCUAUUUAGUCCUAGUG | 3280 | CACUAGGACUAAAUAGGGG |
| siRNA 257 | 257 | CCCUAUUUAGUCCUAGUGG | 3281 | CCACUAGGACUAAAUAGGG |
| siRNA 258 | 258 | CCUAUUUAGUCCUAGUGGA | 3282 | UCCACUAGGACUAAAUAGG |
| siRNA 259 | 259 | CUAUUUAGUCCUAGUGGAC | 3283 | GUCCACUAGGACUAAAUAG |
| siRNA 260 | 260 | UAUUUAGUCCUAGUGGACA | 3284 | UGUCCACUAGGACUAAAUA |
| siRNA 261 | 261 | AUUUAGUCCUAGUGGACAG | 3285 | CUGUCCACUAGGACUAAAU |
| siRNA 262 | 262 | UUUAGUCCUAGUGGACAGC | 3286 | GCUGUCCACUAGGACUAAA |
| siRNA 263 | 263 | UUAGUCCUAGUGGACAGCC | 3287 | GGCUGUCCACUAGGACUAA |
| siRNA 264 | 264 | UAGUCCUAGUGGACAGCCU | 3288 | AGGCUGUCCACUAGGACUA |
| siRNA 265 | 265 | AGUCCUAGUGGACAGCCUC | 3289 | GAGGCUGUCCACUAGGACU |
| siRNA 266 | 266 | GUCCUAGUGGACAGCCUCG | 3290 | CGAGGCUGUCCACUAGGAC |
| siRNA 267 | 267 | UCCUAGUGGACAGCCUCGC | 3291 | GCGAGGCUGUCCACUAGGA |
| siRNA 268 | 268 | CCUAGUGGACAGCCUCGCU | 3292 | AGCGAGGCUGUCCACUAGG |
| siRNA 269 | 269 | CUAGUGGACAGCCUCGCUC | 3293 | GAGCGAGGCUGUCCACUAG |
| SIRNA 270 | 270 | UAGUGGACAGCCUCGCUCA | 3294 | UGAGCGAGGCUGUCCACUA |
| siRNA 271 | 271 | AGUGGACAGCCUCGCUCAC | 3295 | GUGAGCGAGGCUGUCCACU |
| siRNA 272 | 272 | GUGGACAGCCUCGCUCACC | 3296 | GGUGAGCGAGGCUGUCCAC |
| siRNA 273 | 273 | UGGACAGCCUCGCUCACCU | 3297 | AGGUGAGCGAGGCUGUCCA |
| siRNA 274 | 274 | GGACAGCCUCGCUCACCUU | 3298 | AAGGUGAGCGAGGCUGUCC |
| siRNA 275 | 275 | GACAGCCUCGCUCACCUUC | 3299 | GAAGGUGAGCGAGGCUGUC |
| siRNA 276 | 276 | ACAGCCUCGCUCACCUUCC | 3300 | GGAAGGUGAGCGAGGCUGU |
| siRNA 277 | 277 | CAGCCUCGCUCACCUUCCC | 3301 | GGGAAGGUGAGCGAGGCUG |
| siRNA 278 | 278 | AGCCUCGCUCACCUUCCCU | 3302 | AGGGAAGGUGAGCGAGGCU |
| siRNA 279 | 279 | GCCUCGCUCACCUUCCCUG | 3303 | CAGGGAAGGUGAGCGAGGC |
| siRNA 280 | 280 | CCUCGCUCACCUUCCCUGG | 3304 | CCAGGGAAGGUGAGCGAGG |
| siRNA 281 | 281 | CUCGCUCACCUUCCCUGGG | 3305 | CCCAGGGAAGGUGAGCGAG |
| siRNA 282 | 282 | UCGCUCACCUUCCCUGGGA | 3306 | UCCCAGGGAAGGUGAGCGA |
| siRNA 283 | 283 | CGCUCACCUUCCCUGGGAU | 3307 | AUCCCAGGGAAGGUGAGCG |
| siRNA 284 | 284 | GCUCACCUUCCCUGGGAUG | 3308 | CAUCCCAGGGAAGGUGAGC |
| siRNA 285 | 285 | CUCACCUUCCCUGGGAUGA | 3309 | UCAUCCCAGGGAAGGUGAG |
| siRNA 286 | 286 | UCACCUUCCCUGGGAUGAC | 3310 | GUCAUCCCAGGGAAGGUGA |
| siRNA 287 | 287 | CACCUUCCCUGGGAUGACA | 3311 | UGUCAUCCCAGGGAAGGUG |
| siRNA 288 | 288 | ACCUUCCCUGGGAUGACAC | 3312 | GUGUCAUCCCAGGGAAGGU |
| siRNA 289 | 289 | CCUUCCCUGGGAUGACACU | 3313 | AGUGUCAUCCCAGGGAAGG |
| siRNA 290 | 290 | CUUCCCUGGGAUGACACUU | 3314 | AAGUGUCAUCCCAGGGAAG |
| siRNA 291 | 291 | UUCCCUGGGAUGACACUUC | 3315 | GAAGUGUCAUCCCAGGGAA |
| siRNA 292 | 292 | UCCCUGGGAUGACACUUCU | 3316 | AGAAGUGUCAUCCCAGGGA |
| siRNA 293 | 293 | CCCUGGGAUGACACUUCUG | 3317 | CAGAAGUGUCAUCCCAGGG |
| siRNA 294 | 294 | CCUGGGAUGACACUUCUGG | 3318 | CCAGAAGUGUCAUCCCAGG |
| siRNA 295 | 295 | CUGGGAUGACACUUCUGGC | 3319 | GCCAGAAGUGUCAUCCCAG |
| siRNA 296 | 296 | UGGGAUGACACUUCUGGCG | 3320 | CGCCAGAAGUGUCAUCCCA |
| siRNA 297 | 297 | GGGAUGACACUUCUGGCGG | 3321 | CCGCCAGAAGUGUCAUCCC |
| siRNA 298 | 298 | GGAUGACACUUCUGGCGGC | 3322 | GCCGCCAGAAGUGUCAUCC |
| siRNA 299 | 299 | GAUGACACUUCUGGCGGCU | 3323 | AGCCGCCAGAAGUGUCAUC |
| siRNA 300 | 300 | AUGACACUUCUGGCGGCUG | 3324 | CAGCCGCCAGAAGUGUCAU |
| siRNA 301 | 301 | UGACACUUCUGGCGGCUGA | 3325 | UCAGCCGCCAGAAGUGUCA |
| siRNA 302 | 302 | GACACUUCUGGCGGCUGAG | 3326 | CUCAGCCGCCAGAAGUGUC |
| siRNA 303 | 303 | ACACUUCUGGCGGCUGAGA | 3327 | UCUCAGCCGCCAGAAGUGU |
| siRNA 304 | 304 | CACUUCUGGCGGCUGAGAU | 3328 | AUCUCAGCCGCCAGAAGUG |
| siRNA 305 | 305 | ACUUCUGGCGGCUGAGAUG | 3329 | CAUCUCAGCCGCCAGAAGU |
| siRNA 306 | 306 | CUUCUGGCGGCUGAGAUGA | 3330 | UCAUCUCAGCCGCCAGAAG |
| siRNA 307 | 307 | UUCUGGCGGCUGAGAUGAG | 3331 | CUCAUCUCAGCCGCCAGAA |
| siRNA 308 | 308 | UCUGGCGGCUGAGAUGAGC | 3332 | GCUCAUCUCAGCCGCCAGA |
| siRNA 309 | 309 | CUGGCGGCUGAGAUGAGCG | 3333 | CGCUCAUCUCAGCCGCCAG |
| siRNA 310 | 310 | UGGCGGCUGAGAUGAGCGA | 3334 | UCGCUCAUCUCAGCCGCCA |
| siRNA 311 | 311 | GGCGGCUGAGAUGAGCGAG | 3335 | CUCGCUCAUCUCAGCCGCC |
| siRNA 312 | 312 | GCGGCUGAGAUGAGCGAGC | 3336 | GCUCGCUCAUCUCAGCCGC |
| siRNA 313 | 313 | CGGCUGAGAUGAGCGAGCC | 3337 | GGCUCGCUCAUCUCAGCCG |
| siRNA 314 | 314 | GGCUGAGAUGAGCGAGCCU | 3338 | AGGCUCGCUCAUCUCAGCC |
| siRNA 315 | 315 | GCUGAGAUGAGCGAGCCUC | 3339 | GAGGCUCGCUCAUCUCAGC |
| siRNA 316 | 316 | CUGAGAUGAGCGAGCCUCU | 3340 | AGAGGCUCGCUCAUCUCAG |
| siRNA 317 | 317 | UGAGAUGAGCGAGCCUCUC | 3341 | GAGAGGCUCGCUCAUCUCA |
| siRNA 318 | 318 | GAGAUGAGCGAGCCUCUCU | 3342 | AGAGAGGCUCGCUCAUCUC |
| siRNA 319 | 319 | AGAUGAGCGAGCCUCUCUG | 3343 | CAGAGAGGCUCGCUCAUCU |
| siRNA 320 | 320 | GAUGAGCGAGCCUCUCUGG | 3344 | CCAGAGAGGCUCGCUCAUC |
| siRNA 321 | 321 | AUGAGCGAGCCUCUCUGGG | 3345 | CCCAGAGAGGCUCGCUCAU |
| siRNA 322 | 322 | UGAGCGAGCCUCUCUGGGC | 3346 | GCCCAGAGAGGCUCGCUCA |
| siRNA 323 | 323 | GAGCGAGCCUCUCUGGGCU | 3347 | AGCCCAGAGAGGCUCGCUC |
| siRNA 324 | 324 | AGCGAGCCUCUCUGGGCUC | 3348 | GAGCCCAGAGAGGCUCGCU |
| siRNA 325 | 325 | GCGAGCCUCUCUGGGCUCU | 3349 | AGAGCCCAGAGAGGCUCGC |
| siRNA 326 | 326 | CGAGCCUCUCUGGGCUCUG | 3350 | CAGAGCCCAGAGAGGCUCG |
| siRNA 327 | 327 | GAGCCUCUCUGGGCUCUGC | 3351 | GCAGAGCCCAGAGAGGCUC |
| siRNA 328 | 328 | AGCCUCUCUGGGCUCUGCC | 3352 | GGCAGAGCCCAGAGAGGCU |
| siRNA 329 | 329 | GCCUCUCUGGGCUCUGCCG | 3353 | CGGCAGAGCCCAGAGAGGC |
| siRNA 330 | 330 | CCUCUCUGGGCUCUGCCGC | 3354 | GCGGCAGAGCCCAGAGAGG |
| siRNA 331 | 331 | CUCUCUGGGCUCUGCCGCC | 3355 | GGCGGCAGAGCCCAGAGAG |
| siRNA 332 | 332 | UCUCUGGGCUCUGCCGCCG | 3356 | CGGCGGCAGAGCCCAGAGA |
| siRNA 333 | 333 | CUCUGGGCUCUGCCGCCGG | 3357 | CCGGCGGCAGAGCCCAGAG |
| siRNA 334 | 334 | UCUGGGCUCUGCCGCCGGG | 3358 | CCCGGCGGCAGAGCCCAGA |
| siRNA 335 | 335 | CUGGGCUCUGCCGCCGGGU | 3359 | ACCCGGCGGCAGAGCCCAG |
| siRNA 336 | 336 | UGGGCUCUGCCGCCGGGUG | 3360 | CACCCGGCGGCAGAGCCCA |
| siRNA 337 | 337 | GGGCUCUGCCGCCGGGUGU | 3361 | ACACCCGGCGGCAGAGCCC |
| siRNA 338 | 338 | GGCUCUGCCGCCGGGUGUG | 3362 | CACACCCGGCGGCAGAGCC |
| siRNA 339 | 339 | GCUCUGCCGCCGGGUGUGG | 3363 | CCACACCCGGCGGCAGAGC |
| siRNA 340 | 340 | CUCUGCCGCCGGGUGUGGG | 3364 | CCCACACCCGGCGGCAGAG |
| siRNA 341 | 341 | UCUGCCGCCGGGUGUGGGC | 3365 | GCCCACACCCGGCGGCAGA |
| siRNA 342 | 342 | CUGCCGCCGGGUGUGGGCU | 3366 | AGCCCACACCCGGCGGCAG |
| siRNA 343 | 343 | UGCCGCCGGGUGUGGGCUG | 3367 | CAGCCCACACCCGGCGGCA |
| siRNA 344 | 344 | GCCGCCGGGUGUGGGCUGA | 3368 | UCAGCCCACACCCGGCGGC |
| siRNA 345 | 345 | CCGCCGGGUGUGGGCUGAC | 3369 | GUCAGCCCACACCCGGCGG |
| siRNA 346 | 346 | CGCCGGGUGUGGGCUGACC | 3370 | GGUCAGCCCACACCCGGCG |
| siRNA 347 | 347 | GCCGGGUGUGGGCUGACCU | 3371 | AGGUCAGCCCACACCCGGC |
| siRNA 348 | 348 | CCGGGUGUGGGCUGACCUG | 3372 | CAGGUCAGCCCACACCCGG |
| siRNA 349 | 349 | CGGGUGUGGGCUGACCUGC | 3373 | GCAGGUCAGCCCACACCCG |
| siRNA 350 | 350 | GGGUGUGGGCUGACCUGCC | 3374 | GGCAGGUCAGCCCACACCC |
| siRNA 351 | 351 | GGUGUGGGCUGACCUGCCU | 3375 | AGGCAGGUCAGCCCACACC |
| siRNA 352 | 352 | GUGUGGGCUGACCUGCCUA | 3376 | UAGGCAGGUCAGCCCACAC |
| siRNA 353 | 353 | UGUGGGCUGACCUGCCUAC | 3377 | GUAGGCAGGUCAGCCCACA |
| siRNA 354 | 354 | GUGGGCUGACCUGCCUACA | 3378 | UGUAGGCAGGUCAGCCCAC |
| siRNA 355 | 355 | UGGGCUGACCUGCCUACAG | 3379 | CUGUAGGCAGGUCAGCCCA |
| siRNA 356 | 356 | GGGCUGACCUGCCUACAGC | 3380 | GCUGUAGGCAGGUCAGCCC |
| siRNA 357 | 357 | GGCUGACCUGCCUACAGCU | 3381 | AGCUGUAGGCAGGUCAGCC |
| siRNA 358 | 358 | GCUGACCUGCCUACAGCUG | 3382 | CAGCUGUAGGCAGGUCAGC |
| siRNA 359 | 359 | CUGACCUGCCUACAGCUGG | 3383 | CCAGCUGUAGGCAGGUCAG |
| siRNA 360 | 360 | UGACCUGCCUACAGCUGGG | 3384 | CCCAGCUGUAGGCAGGUCA |
| siRNA 361 | 361 | GACCUGCCUACAGCUGGGG | 3385 | CCCCAGCUGUAGGCAGGUC |
| siRNA 362 | 362 | ACCUGCCUACAGCUGGGGC | 3386 | GCCCCAGCUGUAGGCAGGU |
| siRNA 363 | 363 | CCUGCCUACAGCUGGGGCC | 3387 | GGCCCCAGCUGUAGGCAGG |
| siRNA 364 | 364 | CUGCCUACAGCUGGGGCCU | 3388 | AGGCCCCAGCUGUAGGCAG |
| siRNA 365 | 365 | UGCCUACAGCUGGGGCCUG | 3389 | CAGGCCCCAGCUGUAGGCA |
| siRNA 366 | 366 | GCCUACAGCUGGGGCCUGA | 3390 | UCAGGCCCCAGCUGUAGGC |
| siRNA 367 | 367 | CCUACAGCUGGGGCCUGAU | 3391 | AUCAGGCCCCAGCUGUAGG |
| siRNA 368 | 368 | CUACAGCUGGGGCCUGAUA | 3392 | UAUCAGGCCCCAGCUGUAG |
| siRNA 369 | 369 | UACAGCUGGGGCCUGAUAA | 3393 | UUAUCAGGCCCCAGCUGUA |
| siRNA 370 | 370 | ACAGCUGGGGCCUGAUAAG | 3394 | CUUAUCAGGCCCCAGCUGU |
| siRNA 371 | 371 | CAGCUGGGGCCUGAUAAGG | 3395 | CCUUAUCAGGCCCCAGCUG |
| siRNA 372 | 372 | AGCUGGGGCCUGAUAAGGC | 3396 | GCCUUAUCAGGCCCCAGCU |
| siRNA 373 | 373 | GCUGGGGCCUGAUAAGGCA | 3397 | UGCCUUAUCAGGCCCCAGC |
| siRNA 374 | 374 | CUGGGGCCUGAUAAGGCAG | 3398 | CUGCCUUAUCAGGCCCCAG |
| siRNA 375 | 375 | UGGGGCCUGAUAAGGCAGC | 3399 | GCUGCCUUAUCAGGCCCCA |
| siRNA 376 | 376 | GGGGCCUGAUAAGGCAGCA | 3400 | UGCUGCCUUAUCAGGCCCC |
| siRNA 377 | 377 | GGGCCUGAUAAGGCAGCAG | 3401 | CUGCUGCCUUAUCAGGCCC |
| siRNA 378 | 378 | GGCCUGAUAAGGCAGCAGC | 3402 | GCUGCUGCCUUAUCAGGCC |
| siRNA 379 | 379 | GCCUGAUAAGGCAGCAGCA | 3403 | UGCUGCUGCCUUAUCAGGC |
| siRNA 380 | 380 | CCUGAUAAGGCAGCAGCAA | 3404 | UUGCUGCUGCCUUAUCAGG |
| siRNA 381 | 381 | CUGAUAAGGCAGCAGCAAA | 3405 | UUUGCUGCUGCCUUAUCAG |
| siRNA 382 | 382 | UGAUAAGGCAGCAGCAAAA | 3406 | UUUUGCUGCUGCCUUAUCA |
| siRNA 383 | 383 | GAUAAGGCAGCAGCAAAAG | 3407 | CUUUUGCUGCUGCCUUAUC |
| siRNA 384 | 384 | AUAAGGCAGCAGCAAAAGG | 3408 | CCUUUUGCUGCUGCCUUAU |
| siRNA 385 | 385 | UAAGGCAGCAGCAAAAGGG | 3409 | CCCUUUUGCUGCUGCCUUA |
| siRNA 386 | 386 | AAGGCAGCAGCAAAAGGGU | 3410 | ACCCUUUUGCUGCUGCCUU |
| siRNA 387 | 387 | AGGCAGCAGCAAAAGGGUG | 3411 | CACCCUUUUGCUGCUGCCU |
| siRNA 388 | 388 | GGCAGCAGCAAAAGGGUGG | 3412 | CCACCCUUUUGCUGCUGCC |
| siRNA 389 | 389 | GCAGCAGCAAAAGGGUGGA | 3413 | UCCACCCUUUUGCUGCUGC |
| siRNA 390 | 390 | CAGCAGCAAAAGGGUGGAG | 3414 | CUCCACCCUUUUGCUGCUG |
| siRNA 391 | 391 | AGCAGCAAAAGGGUGGAGG | 3415 | CCUCCACCCUUUUGCUGCU |
| siRNA 392 | 392 | GCAGCAAAAGGGUGGAGGG | 3416 | CCCUCCACCCUUUUGCUGC |
| siRNA 393 | 393 | CAGCAAAAGGGUGGAGGGG | 3417 | CCCCUCCACCCUUUUGCUG |
| siRNA 394 | 394 | AGCAAAAGGGUGGAGGGGA | 3418 | UCCCCUCCACCCUUUUGCU |
| siRNA 395 | 395 | GCAAAAGGGUGGAGGGGAG | 3419 | CUCCCCUCCACCCUUUUGC |
| siRNA 396 | 396 | CAAAAGGGUGGAGGGGAGG | 3420 | CCUCCCCUCCACCCUUUUG |
| siRNA 397 | 397 | AAAAGGGUGGAGGGGAGGC | 3421 | GCCUCCCCUCCACCCUUUU |
| siRNA 398 | 398 | AAAGGGUGGAGGGGAGGCA | 3422 | UGCCUCCCCUCCACCCUUU |
| siRNA 399 | 399 | AAGGGUGGAGGGGAGGCAG | 3423 | CUGCCUCCCCUCCACCCUU |
| siRNA 400 | 400 | AGGGUGGAGGGGAGGCAGU | 3424 | ACUGCCUCCCCUCCACCCU |
| siRNA 401 | 401 | GGGUGGAGGGGAGGCAGUG | 3425 | CACUGCCUCCCCUCCACCC |
| siRNA 402 | 402 | GGUGGAGGGGAGGCAGUGU | 3426 | ACACUGCCUCCCCUCCACC |
| siRNA 403 | 403 | GUGGAGGGGAGGCAGUGUU | 3427 | AACACUGCCUCCCCUCCAC |
| siRNA 404 | 404 | UGGAGGGGAGGCAGUGUUG | 3428 | CAACACUGCCUCCCCUCCA |
| siRNA 405 | 405 | GGAGGGGAGGCAGUGUUGA | 3429 | UCAACACUGCCUCCCCUCC |
| siRNA 406 | 406 | GAGGGGAGGCAGUGUUGAA | 3430 | UUCAACACUGCCUCCCCUC |
| siRNA 407 | 407 | AGGGGAGGCAGUGUUGAAG | 3431 | CUUCAACACUGCCUCCCCU |
| siRNA 408 | 408 | GGGGAGGCAGUGUUGAAGC | 3432 | GCUUCAACACUGCCUCCCC |
| siRNA 409 | 409 | GGGAGGCAGUGUUGAAGCU | 3433 | AGCUUCAACACUGCCUCCC |
| siRNA 410 | 410 | GGAGGCAGUGUUGAAGCUG | 3434 | CAGCUUCAACACUGCCUCC |
| siRNA 411 | 411 | GAGGCAGUGUUGAAGCUGG | 3435 | CCAGCUUCAACACUGCCUC |
| siRNA 412 | 412 | AGGCAGUGUUGAAGCUGGG | 3436 | CCCAGCUUCAACACUGCCU |
| siRNA 413 | 413 | GGCAGUGUUGAAGCUGGGG | 3437 | CCCCAGCUUCAACACUGCC |
| siRNA 414 | 414 | GCAGUGUUGAAGCUGGGGC | 3438 | GCCCCAGCUUCAACACUGC |
| siRNA 415 | 415 | CAGUGUUGAAGCUGGGGCA | 3439 | UGCCCCAGCUUCAACACUG |
| siRNA 416 | 416 | AGUGUUGAAGCUGGGGCAA | 3440 | UUGCCCCAGCUUCAACACU |
| siRNA 417 | 417 | GUGUUGAAGCUGGGGCAAG | 3441 | CUUGCCCCAGCUUCAACAC |
| siRNA 418 | 418 | UGUUGAAGCUGGGGCAAGU | 3442 | ACUUGCCCCAGCUUCAACA |
| siRNA 419 | 419 | GUUGAAGCUGGGGCAAGUA | 3443 | UACUUGCCCCAGCUUCAAC |
| siRNA 420 | 420 | UUGAAGCUGGGGCAAGUAA | 3444 | UUACUUGCCCCAGCUUCAA |
| siRNA 421 | 421 | UGAAGCUGGGGCAAGUAAU | 3445 | AUUACUUGCCCCAGCUUCA |
| siRNA 422 | 422 | GAAGCUGGGGCAAGUAAUU | 3446 | AAUUACUUGCCCCAGCUUC |
| siRNA 423 | 423 | AAGCUGGGGCAAGUAAUUU | 3447 | AAAUUACUUGCCCCAGCUU |
| siRNA 424 | 424 | AGCUGGGGCAAGUAAUUUU | 3448 | AAAAUUACUUGCCCCAGCU |
| siRNA 425 | 425 | GCUGGGGCAAGUAAUUUUC | 3449 | GAAAAUUACUUGCCCCAGC |
| siRNA 426 | 426 | CUGGGGCAAGUAAUUUUCC | 3450 | GGAAAAUUACUUGCCCCAG |
| siRNA 427 | 427 | UGGGGCAAGUAAUUUUCCC | 3451 | GGGAAAAUUACUUGCCCCA |
| siRNA 428 | 428 | GGGGCAAGUAAUUUUCCCC | 3452 | GGGGAAAAUUACUUGCCCC |
| siRNA 429 | 429 | GGGCAAGUAAUUUUCCCCA | 3453 | UGGGGAAAAUUACUUGCCC |
| siRNA 430 | 430 | GGCAAGUAAUUUUCCCCAA | 3454 | UUGGGGAAAAUUACUUGCC |
| siRNA 431 | 431 | GCAAGUAAUUUUCCCCAAU | 3455 | AUUGGGGAAAAUUACUUGC |
| siRNA 432 | 432 | CAAGUAAUUUUCCCCAAUU | 3456 | AAUUGGGGAAAAUUACUUG |
| siRNA 433 | 433 | AAGUAAUUUUCCCCAAUUU | 3457 | AAAUUGGGGAAAAUUACUU |
| siRNA 434 | 434 | AGUAAUUUUCCCCAAUUUA | 3458 | UAAAUUGGGGAAAAUUACU |
| siRNA 435 | 435 | GUAAUUUUCCCCAAUUUAC | 3459 | GUAAAUUGGGGAAAAUUAC |
| siRNA 436 | 436 | UAAUUUUCCCCAAUUUACA | 3460 | UGUAAAUUGGGGAAAAUUA |
| siRNA 437 | 437 | AAUUUUCCCCAAUUUACAG | 3461 | CUGUAAAUUGGGGAAAAUU |
| siRNA 438 | 438 | AUUUUCCCCAAUUUACAGG | 3462 | CCUGUAAAUUGGGGAAAAU |
| siRNA 439 | 439 | UUUUCCCCAAUUUACAGGG | 3463 | CCCUGUAAAUUGGGGAAAA |
| siRNA 440 | 440 | UUUCCCCAAUUUACAGGGA | 3464 | UCCCUGUAAAUUGGGGAAA |
| siRNA 441 | 441 | UUCCCCAAUUUACAGGGAA | 3465 | UUCCCUGUAAAUUGGGGAA |
| siRNA 442 | 442 | UCCCCAAUUUACAGGGAAA | 3466 | UUUCCCUGUAAAUUGGGGA |
| siRNA 443 | 443 | CCCCAAUUUACAGGGAAAA | 3467 | UUUUCCCUGUAAAUUGGGG |
| siRNA 444 | 444 | CCCAAUUUACAGGGAAAAA | 3468 | UUUUUCCCUGUAAAUUGGG |
| siRNA 445 | 445 | CCAAUUUACAGGGAAAAAC | 3469 | GUUUUUCCCUGUAAAUUGG |
| siRNA 446 | 446 | CAAUUUACAGGGAAAAACC | 3470 | GGUUUUUCCCUGUAAAUUG |
| siRNA 447 | 447 | AAUUUACAGGGAAAAACCG | 3471 | CGGUUUUUCCCUGUAAAUU |
| siRNA 448 | 448 | AUUUACAGGGAAAAACCGA | 3472 | UCGGUUUUUCCCUGUAAAU |
| siRNA 449 | 449 | UUUACAGGGAAAAACCGAA | 3473 | UUCGGUUUUUCCCUGUAAA |
| siRNA 450 | 450 | UUACAGGGAAAAACCGAAA | 3474 | UUUCGGUUUUUCCCUGUAA |
| siRNA 451 | 451 | UACAGGGAAAAACCGAAAU | 3475 | AUUUCGGUUUUUCCCUGUA |
| siRNA 452 | 452 | ACAGGGAAAAACCGAAAUU | 3476 | AAUUUCGGUUUUUCCCUGU |
| siRNA 453 | 453 | CAGGGAAAAACCGAAAUUC | 3477 | GAAUUUCGGUUUUUCCCUG |
| siRNA 454 | 454 | AGGGAAAAACCGAAAUUCA | 3478 | UGAAUUUCGGUUUUUCCCU |
| siRNA 455 | 455 | GGGAAAAACCGAAAUUCAG | 3479 | CUGAAUUUCGGUUUUUCCC |
| siRNA 456 | 456 | GGAAAAACCGAAAUUCAGA | 3480 | UCUGAAUUUCGGUUUUUCC |
| siRNA 457 | 457 | GAAAAACCGAAAUUCAGAA | 3481 | UUCUGAAUUUCGGUUUUUC |
| siRNA 458 | 458 | AAAAACCGAAAUUCAGAAA | 3482 | UUUCUGAAUUUCGGUUUUU |
| siRNA 459 | 459 | AAAACCGAAAUUCAGAAAA | 3483 | UUUUCUGAAUUUCGGUUUU |
| siRNA 460 | 460 | AAACCGAAAUUCAGAAAAG | 3484 | CUUUUCUGAAUUUCGGUUU |
| siRNA 461 | 461 | AACCGAAAUUCAGAAAAGU | 3485 | ACUUUUCUGAAUUUCGGUU |
| siRNA 462 | 462 | ACCGAAAUUCAGAAAAGUU | 3486 | AACUUUUCUGAAUUUCGGU |
| siRNA 463 | 463 | CCGAAAUUCAGAAAAGUUU | 3487 | AAACUUUUCUGAAUUUCGG |
| siRNA 464 | 464 | CGAAAUUCAGAAAAGUUUA | 3488 | UAAACUUUUCUGAAUUUCG |
| siRNA 465 | 465 | GAAAUUCAGAAAAGUUUAA | 3489 | UUAAACUUUUCUGAAUUUC |
| siRNA 466 | 466 | AAAUUCAGAAAAGUUUAAU | 3490 | AUUAAACUUUUCUGAAUUU |
| siRNA 467 | 467 | AAUUCAGAAAAGUUUAAUG | 3491 | CAUUAAACUUUUCUGAAUU |
| siRNA 468 | 468 | AUUCAGAAAAGUUUAAUGU | 3492 | ACAUUAAACUUUUCUGAAU |
| siRNA 469 | 469 | UUCAGAAAAGUUUAAUGUC | 3493 | GACAUUAAACUUUUCUGAA |
| siRNA 470 | 470 | UCAGAAAAGUUUAAUGUCA | 3494 | UGACAUUAAACUUUUCUGA |
| siRNA 471 | 471 | CAGAAAAGUUUAAUGUCAC | 3495 | GUGACAUUAAACUUUUCUG |
| siRNA 472 | 472 | AGAAAAGUUUAAUGUCACC | 3496 | GGUGACAUUAAACUUUUCU |
| siRNA 473 | 473 | GAAAAGUUUAAUGUCACCC | 3497 | GGGUGACAUUAAACUUUUC |
| siRNA 474 | 474 | AAAAGUUUAAUGUCACCCA | 3498 | UGGGUGACAUUAAACUUUU |
| siRNA 475 | 475 | AAAGUUUAAUGUCACCCAG | 3499 | CUGGGUGACAUUAAACUUU |
| siRNA 476 | 476 | AAGUUUAAUGUCACCCAGG | 3500 | CCUGGGUGACAUUAAACUU |
| siRNA 477 | 477 | AGUUUAAUGUCACCCAGGG | 3501 | CCCUGGGUGACAUUAAACU |
| siRNA 478 | 478 | GUUUAAUGUCACCCAGGGG | 3502 | CCCCUGGGUGACAUUAAAC |
| siRNA 479 | 479 | UUUAAUGUCACCCAGGGGC | 3503 | GCCCCUGGGUGACAUUAAA |
| siRNA 480 | 480 | UUAAUGUCACCCAGGGGCU | 3504 | AGCCCCUGGGUGACAUUAA |
| siRNA 481 | 481 | UAAUGUCACCCAGGGGCUG | 3505 | CAGCCCCUGGGUGACAUUA |
| siRNA 482 | 482 | AAUGUCACCCAGGGGCUGG | 3506 | CCAGCCCCUGGGUGACAUU |
| siRNA 483 | 483 | AUGUCACCCAGGGGCUGGA | 3507 | UCCAGCCCCUGGGUGACAU |
| siRNA 484 | 484 | UGUCACCCAGGGGCUGGAG | 3508 | CUCCAGCCCCUGGGUGACA |
| siRNA 485 | 485 | GUCACCCAGGGGCUGGAGC | 3509 | GCUCCAGCCCCUGGGUGAC |
| siRNA 486 | 486 | UCACCCAGGGGCUGGAGCC | 3510 | GGCUCCAGCCCCUGGGUGA |
| siRNA 487 | 487 | CACCCAGGGGCUGGAGCCC | 3511 | GGGCUCCAGCCCCUGGGUG |
| siRNA 488 | 488 | ACCCAGGGGCUGGAGCCCA | 3512 | UGGGCUCCAGCCCCUGGGU |
| siRNA 489 | 489 | CCCAGGGGCUGGAGCCCAG | 3513 | CUGGGCUCCAGCCCCUGGG |
| siRNA 490 | 490 | CCAGGGGCUGGAGCCCAGA | 3514 | UCUGGGCUCCAGCCCCUGG |
| siRNA 491 | 491 | CAGGGGCUGGAGCCCAGAC | 3515 | GUCUGGGCUCCAGCCCCUG |
| siRNA 492 | 492 | AGGGGCUGGAGCCCAGACC | 3516 | GGUCUGGGCUCCAGCCCCU |
| siRNA 493 | 493 | GGGGCUGGAGCCCAGACCU | 3517 | AGGUCUGGGCUCCAGCCCC |
| siRNA 494 | 494 | GGGCUGGAGCCCAGACCUC | 3518 | GAGGUCUGGGCUCCAGCCC |
| siRNA 495 | 495 | GGCUGGAGCCCAGACCUCU | 3519 | AGAGGUCUGGGCUCCAGCC |
| siRNA 496 | 496 | GCUGGAGCCCAGACCUCUG | 3520 | CAGAGGUCUGGGCUCCAGC |
| siRNA 497 | 497 | CUGGAGCCCAGACCUCUGG | 3521 | CCAGAGGUCUGGGCUCCAG |
| siRNA 498 | 498 | UGGAGCCCAGACCUCUGGC | 3522 | GCCAGAGGUCUGGGCUCCA |
| siRNA 499 | 499 | GGAGCCCAGACCUCUGGCA | 3523 | UGCCAGAGGUCUGGGCUCC |
| siRNA 500 | 500 | GAGCCCAGACCUCUGGCAG | 3524 | CUGCCAGAGGUCUGGGCUC |
| siRNA 501 | 501 | AGCCCAGACCUCUGGCAGC | 3525 | GCUGCCAGAGGUCUGGGCU |
| siRNA 502 | 502 | GCCCAGACCUCUGGCAGCU | 3526 | AGCUGCCAGAGGUCUGGGC |
| siRNA 503 | 503 | CCCAGACCUCUGGCAGCUC | 3527 | GAGCUGCCAGAGGUCUGGG |
| siRNA 504 | 504 | CCAGACCUCUGGCAGCUCU | 3528 | AGAGCUGCCAGAGGUCUGG |
| siRNA 505 | 505 | CAGACCUCUGGCAGCUCUC | 3529 | GAGAGCUGCCAGAGGUCUG |
| siRNA 506 | 506 | AGACCUCUGGCAGCUCUCA | 3530 | UGAGAGCUGCCAGAGGUCU |
| siRNA 507 | 507 | GACCUCUGGCAGCUCUCAC | 3531 | GUGAGAGCUGCCAGAGGUC |
| siRNA 508 | 508 | ACCUCUGGCAGCUCUCACU | 3532 | AGUGAGAGCUGCCAGAGGU |
| siRNA 509 | 509 | CCUCUGGCAGCUCUCACUU | 3533 | AAGUGAGAGCUGCCAGAGG |
| siRNA 510 | 510 | CUCUGGCAGCUCUCACUUU | 3534 | AAAGUGAGAGCUGCCAGAG |
| siRNA 511 | 511 | UCUGGCAGCUCUCACUUUC | 3535 | GAAAGUGAGAGCUGCCAGA |
| siRNA 512 | 512 | CUGGCAGCUCUCACUUUCA | 3536 | UGAAAGUGAGAGCUGCCAG |
| siRNA 513 | 513 | UGGCAGCUCUCACUUUCAC | 3537 | GUGAAAGUGAGAGCUGCCA |
| siRNA 514 | 514 | GGCAGCUCUCACUUUCACA | 3538 | UGUGAAAGUGAGAGCUGCC |
| siRNA 515 | 515 | GCAGCUCUCACUUUCACAA | 3539 | UUGUGAAAGUGAGAGCUGC |
| siRNA 516 | 516 | CAGCUCUCACUUUCACAAU | 3540 | AUUGUGAAAGUGAGAGCUG |
| siRNA 517 | 517 | AGCUCUCACUUUCACAAUG | 3541 | CAUUGUGAAAGUGAGAGCU |
| siRNA 518 | 518 | GCUCUCACUUUCACAAUGC | 3542 | GCAUUGUGAAAGUGAGAGC |
| siRNA 519 | 519 | CUCUCACUUUCACAAUGCC | 3543 | GGCAUUGUGAAAGUGAGAG |
| siRNA 520 | 520 | UCUCACUUUCACAAUGCCC | 3544 | GGGCAUUGUGAAAGUGAGA |
| siRNA 521 | 521 | CUCACUUUCACAAUGCCCU | 3545 | AGGGCAUUGUGAAAGUGAG |
| siRNA 522 | 522 | UCACUUUCACAAUGCCCUU | 3546 | AAGGGCAUUGUGAAAGUGA |
| siRNA 523 | 523 | CACUUUCACAAUGCCCUUG | 3547 | CAAGGGCAUUGUGAAAGUG |
| siRNA 524 | 524 | ACUUUCACAAUGCCCUUGG | 3548 | CCAAGGGCAUUGUGAAAGU |
| siRNA 525 | 525 | CUUUCACAAUGCCCUUGGG | 3549 | CCCAAGGGCAUUGUGAAAG |
| siRNA 526 | 526 | UUUCACAAUGCCCUUGGGC | 3550 | GCCCAAGGGCAUUGUGAAA |
| siRNA 527 | 527 | UUCACAAUGCCCUUGGGCU | 3551 | AGCCCAAGGGCAUUGUGAA |
| siRNA 528 | 528 | UCACAAUGCCCUUGGGCUG | 3552 | CAGCCCAAGGGCAUUGUGA |
| siRNA 529 | 529 | CACAAUGCCCUUGGGCUGA | 3553 | UCAGCCCAAGGGCAUUGUG |
| siRNA 530 | 530 | ACAAUGCCCUUGGGCUGAC | 3554 | GUCAGCCCAAGGGCAUUGU |
| siRNA 531 | 531 | CAAUGCCCUUGGGCUGACU | 3555 | AGUCAGCCCAAGGGCAUUG |
| siRNA 532 | 532 | AAUGCCCUUGGGCUGACUA | 3556 | UAGUCAGCCCAAGGGCAUU |
| siRNA 533 | 533 | AUGCCCUUGGGCUGACUAG | 3557 | CUAGUCAGCCCAAGGGCAU |
| siRNA 534 | 534 | UGCCCUUGGGCUGACUAGG | 3558 | CCUAGUCAGCCCAAGGGCA |
| siRNA 535 | 535 | GCCCUUGGGCUGACUAGGC | 3559 | GCCUAGUCAGCCCAAGGGC |
| siRNA 536 | 536 | CCCUUGGGCUGACUAGGCU | 3560 | AGCCUAGUCAGCCCAAGGG |
| siRNA 537 | 537 | CCUUGGGCUGACUAGGCUG | 3561 | CAGCCUAGUCAGCCCAAGG |
| siRNA 538 | 538 | CUUGGGCUGACUAGGCUGC | 3562 | GCAGCCUAGUCAGCCCAAG |
| siRNA 539 | 539 | UUGGGCUGACUAGGCUGCA | 3563 | UGCAGCCUAGUCAGCCCAA |
| siRNA 540 | 540 | UGGGCUGACUAGGCUGCAG | 3564 | CUGCAGCCUAGUCAGCCCA |
| siRNA 541 | 541 | GGGCUGACUAGGCUGCAGA | 3565 | UCUGCAGCCUAGUCAGCCC |
| siRNA 542 | 542 | GGCUGACUAGGCUGCAGAG | 3566 | CUCUGCAGCCUAGUCAGCC |
| siRNA 543 | 543 | GCUGACUAGGCUGCAGAGG | 3567 | CCUCUGCAGCCUAGUCAGC |
| siRNA 544 | 544 | CUGACUAGGCUGCAGAGGG | 3568 | CCCUCUGCAGCCUAGUCAG |
| siRNA 545 | 545 | UGACUAGGCUGCAGAGGGG | 3569 | CCCCUCUGCAGCCUAGUCA |
| siRNA 546 | 546 | GACUAGGCUGCAGAGGGGU | 3570 | ACCCCUCUGCAGCCUAGUC |
| siRNA 547 | 547 | ACUAGGCUGCAGAGGGGUU | 3571 | AACCCCUCUGCAGCCUAGU |
| siRNA 548 | 548 | CUAGGCUGCAGAGGGGUUU | 3572 | AAACCCCUCUGCAGCCUAG |
| siRNA 549 | 549 | UAGGCUGCAGAGGGGUUUC | 3573 | GAAACCCCUCUGCAGCCUA |
| siRNA 550 | 550 | AGGCUGCAGAGGGGUUUCA | 3574 | UGAAACCCCUCUGCAGCCU |
| siRNA 551 | 551 | GGCUGCAGAGGGGUUUCAC | 3575 | GUGAAACCCCUCUGCAGCC |
| siRNA 552 | 552 | GCUGCAGAGGGGUUUCACC | 3576 | GGUGAAACCCCUCUGCAGC |
| siRNA 553 | 553 | CUGCAGAGGGGUUUCACCC | 3577 | GGGUGAAACCCCUCUGCAG |
| siRNA 554 | 554 | UGCAGAGGGGUUUCACCCC | 3578 | GGGGUGAAACCCCUCUGCA |
| siRNA 555 | 555 | GCAGAGGGGUUUCACCCCA | 3579 | UGGGGUGAAACCCCUCUGC |
| siRNA 556 | 556 | CAGAGGGGUUUCACCCCAA | 3580 | UUGGGGUGAAACCCCUCUG |
| siRNA 557 | 557 | AGAGGGGUUUCACCCCAAC | 3581 | GUUGGGGUGAAACCCCUCU |
| siRNA 558 | 558 | GAGGGGUUUCACCCCAACC | 3582 | GGUUGGGGUGAAACCCCUC |
| siRNA 559 | 559 | AGGGGUUUCACCCCAACCC | 3583 | GGGUUGGGGUGAAACCCCU |
| siRNA 560 | 560 | GGGGUUUCACCCCAACCCC | 3584 | GGGGUUGGGGUGAAACCCC |
| siRNA 561 | 561 | GGGUUUCACCCCAACCCCA | 3585 | UGGGGUUGGGGUGAAACCC |
| siRNA 562 | 562 | GGUUUCACCCCAACCCCAG | 3586 | CUGGGGUUGGGGUGAAACC |
| siRNA 563 | 563 | GUUUCACCCCAACCCCAGG | 3587 | CCUGGGGUUGGGGUGAAAC |
| siRNA 564 | 564 | UUUCACCCCAACCCCAGGG | 3588 | CCCUGGGGUUGGGGUGAAA |
| siRNA 565 | 565 | UUCACCCCAACCCCAGGGC | 3589 | GCCCUGGGGUUGGGGUGAA |
| siRNA 566 | 566 | UCACCCCAACCCCAGGGCA | 3590 | UGCCCUGGGGUUGGGGUGA |
| siRNA 567 | 567 | CACCCCAACCCCAGGGCAC | 3591 | GUGCCCUGGGGUUGGGGUG |
| siRNA 568 | 568 | ACCCCAACCCCAGGGCACC | 3592 | GGUGCCCUGGGGUUGGGGU |
| siRNA 569 | 569 | CCCCAACCCCAGGGCACCU | 3593 | AGGUGCCCUGGGGUUGGGG |
| siRNA 570 | 570 | CCCAACCCCAGGGCACCUC | 3594 | GAGGUGCCCUGGGGUUGGG |
| siRNA 571 | 571 | CCAACCCCAGGGCACCUCA | 3595 | UGAGGUGCCCUGGGGUUGG |
| siRNA 572 | 572 | CAACCCCAGGGCACCUCAA | 3596 | UUGAGGUGCCCUGGGGUUG |
| siRNA 573 | 573 | AACCCCAGGGCACCUCAAG | 3597 | CUUGAGGUGCCCUGGGGUU |
| siRNA 574 | 574 | ACCCCAGGGCACCUCAAGU | 3598 | ACUUGAGGUGCCCUGGGGU |
| siRNA 575 | 575 | CCCCAGGGCACCUCAAGUG | 3599 | CACUUGAGGUGCCCUGGGG |
| siRNA 576 | 576 | CCCAGGGCACCUCAAGUGU | 3600 | ACACUUGAGGUGCCCUGGG |
| siRNA 577 | 577 | CCAGGGCACCUCAAGUGUC | 3601 | GACACUUGAGGUGCCCUGG |
| siRNA 578 | 578 | CAGGGCACCUCAAGUGUCC | 3602 | GGACACUUGAGGUGCCCUG |
| siRNA 579 | 579 | AGGGCACCUCAAGUGUCCC | 3603 | GGGACACUUGAGGUGCCCU |
| siRNA 580 | 580 | GGGCACCUCAAGUGUCCCC | 3604 | GGGGACACUUGAGGUGCCC |
| siRNA 581 | 581 | GGCACCUCAAGUGUCCCCA | 3605 | UGGGGACACUUGAGGUGCC |
| siRNA 582 | 582 | GCACCUCAAGUGUCCCCAC | 3606 | GUGGGGACACUUGAGGUGC |
| siRNA 583 | 583 | CACCUCAAGUGUCCCCACC | 3607 | GGUGGGGACACUUGAGGUG |
| siRNA 584 | 584 | ACCUCAAGUGUCCCCACCA | 3608 | UGGUGGGGACACUUGAGGU |
| siRNA 585 | 585 | CCUCAAGUGUCCCCACCAA | 3609 | UUGGUGGGGACACUUGAGG |
| siRNA 586 | 586 | CUCAAGUGUCCCCACCAAA | 3610 | UUUGGUGGGGACACUUGAG |
| siRNA 587 | 587 | UCAAGUGUCCCCACCAAAC | 3611 | GUUUGGUGGGGACACUUGA |
| siRNA 588 | 588 | CAAGUGUCCCCACCAAACC | 3612 | GGUUUGGUGGGGACACUUG |
| siRNA 589 | 589 | AAGUGUCCCCACCAAACCU | 3613 | AGGUUUGGUGGGGACACUU |
| siRNA 590 | 590 | AGUGUCCCCACCAAACCUU | 3614 | AAGGUUUGGUGGGGACACU |
| siRNA 591 | 591 | GUGUCCCCACCAAACCUUC | 3615 | GAAGGUUUGGUGGGGACAC |
| siRNA 592 | 592 | UGUCCCCACCAAACCUUCC | 3616 | GGAAGGUUUGGUGGGGACA |
| siRNA 593 | 593 | GUCCCCACCAAACCUUCCU | 3617 | AGGAAGGUUUGGUGGGGAC |
| siRNA 594 | 594 | UCCCCACCAAACCUUCCUA | 3618 | UAGGAAGGUUUGGUGGGGA |
| siRNA 595 | 595 | CCCCACCAAACCUUCCUAA | 3619 | UUAGGAAGGUUUGGUGGGG |
| siRNA 596 | 596 | CCCACCAAACCUUCCUAAC | 3620 | GUUAGGAAGGUUUGGUGGG |
| siRNA 597 | 597 | CCACCAAACCUUCCUAACA | 3621 | UGUUAGGAAGGUUUGGUGG |
| siRNA 598 | 598 | CACCAAACCUUCCUAACAC | 3622 | GUGUUAGGAAGGUUUGGUG |
| siRNA 599 | 599 | ACCAAACCUUCCUAACACC | 3623 | GGUGUUAGGAAGGUUUGGU |
| siRNA 600 | 600 | CCAAACCUUCCUAACACCU | 3624 | AGGUGUUAGGAAGGUUUGG |
| siRNA 601 | 601 | CAAACCUUCCUAACACCUG | 3625 | CAGGUGUUAGGAAGGUUUG |
| siRNA 602 | 602 | AAACCUUCCUAACACCUGU | 3626 | ACAGGUGUUAGGAAGGUUU |
| siRNA 603 | 603 | AACCUUCCUAACACCUGUC | 3627 | GACAGGUGUUAGGAAGGUU |
| siRNA 604 | 604 | ACCUUCCUAACACCUGUCC | 3628 | GGACAGGUGUUAGGAAGGU |
| siRNA 605 | 605 | CCUUCCUAACACCUGUCCA | 3629 | UGGACAGGUGUUAGGAAGG |
| siRNA 606 | 606 | CUUCCUAACACCUGUCCAC | 3630 | GUGGACAGGUGUUAGGAAG |
| siRNA 607 | 607 | UUCCUAACACCUGUCCACU | 3631 | AGUGGACAGGUGUUAGGAA |
| siRNA 608 | 608 | UCCUAACACCUGUCCACUA | 3632 | UAGUGGACAGGUGUUAGGA |
| siRNA 609 | 609 | CCUAACACCUGUCCACUAA | 3633 | UUAGUGGACAGGUGUUAGG |
| siRNA 610 | 610 | CUAACACCUGUCCACUAAG | 3634 | CUUAGUGGACAGGUGUUAG |
| siRNA 611 | 611 | UAACACCUGUCCACUAAGC | 3635 | GCUUAGUGGACAGGUGUUA |
| siRNA 612 | 612 | AACACCUGUCCACUAAGCU | 3636 | AGCUUAGUGGACAGGUGUU |
| siRNA 613 | 613 | ACACCUGUCCACUAAGCUG | 3637 | CAGCUUAGUGGACAGGUGU |
| siRNA 614 | 614 | CACCUGUCCACUAAGCUGU | 3638 | ACAGCUUAGUGGACAGGUG |
| siRNA 615 | 615 | ACCUGUCCACUAAGCUGUA | 3639 | UACAGCUUAGUGGACAGGU |
| siRNA 616 | 616 | CCUGUCCACUAAGCUGUAC | 3640 | GUACAGCUUAGUGGACAGG |
| siRNA 617 | 617 | CUGUCCACUAAGCUGUACU | 3641 | AGUACAGCUUAGUGGACAG |
| siRNA 618 | 618 | UGUCCACUAAGCUGUACUA | 3642 | UAGUACAGCUUAGUGGACA |
| siRNA 619 | 619 | GUCCACUAAGCUGUACUAG | 3643 | CUAGUACAGCUUAGUGGAC |
| siRNA 620 | 620 | UCCACUAAGCUGUACUAGG | 3644 | CCUAGUACAGCUUAGUGGA |
| siRNA 621 | 621 | CCACUAAGCUGUACUAGGC | 3645 | GCCUAGUACAGCUUAGUGG |
| siRNA 622 | 622 | CACUAAGCUGUACUAGGCC | 3646 | GGCCUAGUACAGCUUAGUG |
| siRNA 623 | 623 | ACUAAGCUGUACUAGGCCC | 3647 | GGGCCUAGUACAGCUUAGU |
| siRNA 624 | 624 | CUAAGCUGUACUAGGCCCU | 3648 | AGGGCCUAGUACAGCUUAG |
| siRNA 625 | 625 | UAAGCUGUACUAGGCCCUU | 3649 | AAGGGCCUAGUACAGCUUA |
| siRNA 626 | 626 | AAGCUGUACUAGGCCCUUG | 3650 | CAAGGGCCUAGUACAGCUU |
| siRNA 627 | 627 | AGCUGUACUAGGCCCUUGC | 3651 | GCAAGGGCCUAGUACAGCU |
| siRNA 628 | 628 | GCUGUACUAGGCCCUUGCA | 3652 | UGCAAGGGCCUAGUACAGC |
| siRNA 629 | 629 | CUGUACUAGGCCCUUGCAA | 3653 | UUGCAAGGGCCUAGUACAG |
| siRNA 630 | 630 | UGUACUAGGCCCUUGCAAC | 3654 | GUUGCAAGGGCCUAGUACA |
| siRNA 631 | 631 | GUACUAGGCCCUUGCAACU | 3655 | AGUUGCAAGGGCCUAGUAC |
| siRNA 632 | 632 | UACUAGGCCCUUGCAACUG | 3656 | CAGUUGCAAGGGCCUAGUA |
| siRNA 633 | 633 | ACUAGGCCCUUGCAACUGA | 3657 | UCAGUUGCAAGGGCCUAGU |
| siRNA 634 | 634 | CUAGGCCCUUGCAACUGAC | 3658 | GUCAGUUGCAAGGGCCUAG |
| siRNA 635 | 635 | UAGGCCCUUGCAACUGACC | 3659 | GGUCAGUUGCAAGGGCCUA |
| siRNA 636 | 636 | AGGCCCUUGCAACUGACCU | 3660 | AGGUCAGUUGCAAGGGCCU |
| siRNA 637 | 637 | GGCCCUUGCAACUGACCUA | 3661 | UAGGUCAGUUGCAAGGGCC |
| siRNA 638 | 638 | GCCCUUGCAACUGACCUAU | 3662 | AUAGGUCAGUUGCAAGGGC |
| siRNA 639 | 639 | CCCUUGCAACUGACCUAUG | 3663 | CAUAGGUCAGUUGCAAGGG |
| siRNA 640 | 640 | CCUUGCAACUGACCUAUGG | 3664 | CCAUAGGUCAGUUGCAAGG |
| siRNA 641 | 641 | CUUGCAACUGACCUAUGGG | 3665 | CCCAUAGGUCAGUUGCAAG |
| siRNA 642 | 642 | UUGCAACUGACCUAUGGGA | 3666 | UCCCAUAGGUCAGUUGCAA |
| siRNA 643 | 643 | UGCAACUGACCUAUGGGAC | 3667 | GUCCCAUAGGUCAGUUGCA |
| siRNA 644 | 644 | GCAACUGACCUAUGGGACC | 3668 | GGUCCCAUAGGUCAGUUGC |
| siRNA 645 | 645 | CAACUGACCUAUGGGACCU | 3669 | AGGUCCCAUAGGUCAGUUG |
| siRNA 646 | 646 | AACUGACCUAUGGGACCUG | 3670 | CAGGUCCCAUAGGUCAGUU |
| siRNA 647 | 647 | ACUGACCUAUGGGACCUGA | 3671 | UCAGGUCCCAUAGGUCAGU |
| siRNA 648 | 648 | CUGACCUAUGGGACCUGAG | 3672 | CUCAGGUCCCAUAGGUCAG |
| siRNA 649 | 649 | UGACCUAUGGGACCUGAGG | 3673 | CCUCAGGUCCCAUAGGUCA |
| siRNA 650 | 650 | GACCUAUGGGACCUGAGGC | 3674 | GCCUCAGGUCCCAUAGGUC |
| siRNA 651 | 651 | ACCUAUGGGACCUGAGGCC | 3675 | GGCCUCAGGUCCCAUAGGU |
| siRNA 652 | 652 | CCUAUGGGACCUGAGGCCU | 3676 | AGGCCUCAGGUCCCAUAGG |
| siRNA 653 | 653 | CUAUGGGACCUGAGGCCUG | 3677 | CAGGCCUCAGGUCCCAUAG |
| siRNA 654 | 654 | UAUGGGACCUGAGGCCUGG | 3678 | CCAGGCCUCAGGUCCCAUA |
| siRNA 655 | 655 | AUGGGACCUGAGGCCUGGC | 3679 | GCCAGGCCUCAGGUCCCAU |
| siRNA 656 | 656 | UGGGACCUGAGGCCUGGCC | 3680 | GGCCAGGCCUCAGGUCCCA |
| siRNA 657 | 657 | GGGACCUGAGGCCUGGCCC | 3681 | GGGCCAGGCCUCAGGUCCC |
| siRNA 658 | 658 | GGACCUGAGGCCUGGCCCC | 3682 | GGGGCCAGGCCUCAGGUCC |
| siRNA 659 | 659 | GACCUGAGGCCUGGCCCCU | 3683 | AGGGGCCAGGCCUCAGGUC |
| siRNA 660 | 660 | ACCUGAGGCCUGGCCCCUC | 3684 | GAGGGGCCAGGCCUCAGGU |
| siRNA 661 | 661 | CCUGAGGCCUGGCCCCUCA | 3685 | UGAGGGGCCAGGCCUCAGG |
| siRNA 662 | 662 | CUGAGGCCUGGCCCCUCAU | 3686 | AUGAGGGGCCAGGCCUCAG |
| siRNA 663 | 663 | UGAGGCCUGGCCCCUCAUG | 3687 | CAUGAGGGGCCAGGCCUCA |
| siRNA 664 | 664 | GAGGCCUGGCCCCUCAUGG | 3688 | CCAUGAGGGGCCAGGCCUC |
| siRNA 665 | 665 | AGGCCUGGCCCCUCAUGGC | 3689 | GCCAUGAGGGGCCAGGCCU |
| siRNA 666 | 666 | GGCCUGGCCCCUCAUGGCU | 3690 | AGCCAUGAGGGGCCAGGCC |
| siRNA 667 | 667 | GCCUGGCCCCUCAUGGCUC | 3691 | GAGCCAUGAGGGGCCAGGC |
| siRNA 668 | 668 | CCUGGCCCCUCAUGGCUCC | 3692 | GGAGCCAUGAGGGGCCAGG |
| siRNA 669 | 669 | CUGGCCCCUCAUGGCUCCU | 3693 | AGGAGCCAUGAGGGGCCAG |
| siRNA 670 | 670 | UGGCCCCUCAUGGCUCCUG | 3694 | CAGGAGCCAUGAGGGGCCA |
| siRNA 671 | 671 | GGCCCCUCAUGGCUCCUGU | 3695 | ACAGGAGCCAUGAGGGGCC |
| siRNA 672 | 672 | GCCCCUCAUGGCUCCUGUC | 3696 | GACAGGAGCCAUGAGGGGC |
| siRNA 673 | 673 | CCCCUCAUGGCUCCUGUCA | 3697 | UGACAGGAGCCAUGAGGGG |
| siRNA 674 | 674 | CCCUCAUGGCUCCUGUCAC | 3698 | GUGACAGGAGCCAUGAGGG |
| siRNA 675 | 675 | CCUCAUGGCUCCUGUCACC | 3699 | GGUGACAGGAGCCAUGAGG |
| siRNA 676 | 676 | CUCAUGGCUCCUGUCACCA | 3700 | UGGUGACAGGAGCCAUGAG |
| siRNA 677 | 677 | UCAUGGCUCCUGUCACCAG | 3701 | CUGGUGACAGGAGCCAUGA |
| siRNA 678 | 678 | CAUGGCUCCUGUCACCAGG | 3702 | CCUGGUGACAGGAGCCAUG |
| siRNA 679 | 679 | AUGGCUCCUGUCACCAGGU | 3703 | ACCUGGUGACAGGAGCCAU |
| siRNA 680 | 680 | UGGCUCCUGUCACCAGGUC | 3704 | GACCUGGUGACAGGAGCCA |
| siRNA 681 | 681 | GGCUCCUGUCACCAGGUCU | 3705 | AGACCUGGUGACAGGAGCC |
| siRNA 682 | 682 | GCUCCUGUCACCAGGUCUC | 3706 | GAGACCUGGUGACAGGAGC |
| siRNA 683 | 683 | CUCCUGUCACCAGGUCUCA | 3707 | UGAGACCUGGUGACAGGAG |
| siRNA 684 | 684 | UCCUGUCACCAGGUCUCAG | 3708 | CUGAGACCUGGUGACAGGA |
| siRNA 685 | 685 | CCUGUCACCAGGUCUCAGG | 3709 | CCUGAGACCUGGUGACAGG |
| siRNA 686 | 686 | CUGUCACCAGGUCUCAGGU | 3710 | ACCUGAGACCUGGUGACAG |
| siRNA 687 | 687 | UGUCACCAGGUCUCAGGUC | 3711 | GACCUGAGACCUGGUGACA |
| siRNA 688 | 688 | GUCACCAGGUCUCAGGUCA | 3712 | UGACCUGAGACCUGGUGAC |
| siRNA 689 | 689 | UCACCAGGUCUCAGGUCAG | 3713 | CUGACCUGAGACCUGGUGA |
| siRNA 690 | 690 | CACCAGGUCUCAGGUCAGG | 3714 | CCUGACCUGAGACCUGGUG |
| siRNA 691 | 691 | ACCAGGUCUCAGGUCAGGG | 3715 | CCCUGACCUGAGACCUGGU |
| siRNA 692 | 692 | CCAGGUCUCAGGUCAGGGU | 3716 | ACCCUGACCUGAGACCUGG |
| siRNA 693 | 693 | CAGGUCUCAGGUCAGGGUC | 3717 | GACCCUGACCUGAGACCUG |
| siRNA 694 | 694 | AGGUCUCAGGUCAGGGUCC | 3718 | GGACCCUGACCUGAGACCU |
| siRNA 695 | 695 | GGUCUCAGGUCAGGGUCCA | 3719 | UGGACCCUGACCUGAGACC |
| siRNA 696 | 696 | GUCUCAGGUCAGGGUCCAG | 3720 | CUGGACCCUGACCUGAGAC |
| siRNA 697 | 697 | UCUCAGGUCAGGGUCCAGC | 3721 | GCUGGACCCUGACCUGAGA |
| siRNA 698 | 698 | CUCAGGUCAGGGUCCAGCA | 3722 | UGCUGGACCCUGACCUGAG |
| siRNA 699 | 699 | UCAGGUCAGGGUCCAGCAG | 3723 | CUGCUGGACCCUGACCUGA |
| siRNA 700 | 700 | CAGGUCAGGGUCCAGCAGG | 3724 | CCUGCUGGACCCUGACCUG |
| siRNA 701 | 701 | AGGUCAGGGUCCAGCAGGC | 3725 | GCCUGCUGGACCCUGACCU |
| siRNA 702 | 702 | GGUCAGGGUCCAGCAGGCC | 3726 | GGCCUGCUGGACCCUGACC |
| siRNA 703 | 703 | GUCAGGGUCCAGCAGGCCC | 3727 | GGGCCUGCUGGACCCUGAC |
| siRNA 704 | 704 | UCAGGGUCCAGCAGGCCCU | 3728 | AGGGCCUGCUGGACCCUGA |
| siRNA 705 | 705 | CAGGGUCCAGCAGGCCCUG | 3729 | CAGGGCCUGCUGGACCCUG |
| siRNA 706 | 706 | AGGGUCCAGCAGGCCCUGA | 3730 | UCAGGGCCUGCUGGACCCU |
| siRNA 707 | 707 | GGGUCCAGCAGGCCCUGAG | 3731 | CUCAGGGCCUGCUGGACCC |
| siRNA 708 | 708 | GGUCCAGCAGGCCCUGAGC | 3732 | GCUCAGGGCCUGCUGGACC |
| siRNA 709 | 709 | GUCCAGCAGGCCCUGAGCU | 3733 | AGCUCAGGGCCUGCUGGAC |
| siRNA 710 | 710 | UCCAGCAGGCCCUGAGCUG | 3734 | CAGCUCAGGGCCUGCUGGA |
| siRNA 711 | 711 | CCAGCAGGCCCUGAGCUGA | 3735 | UCAGCUCAGGGCCUGCUGG |
| siRNA 712 | 712 | CAGCAGGCCCUGAGCUGAC | 3736 | GUCAGCUCAGGGCCUGCUG |
| siRNA 713 | 713 | AGCAGGCCCUGAGCUGACG | 3737 | CGUCAGCUCAGGGCCUGCU |
| siRNA 714 | 714 | GCAGGCCCUGAGCUGACGU | 3738 | ACGUCAGCUCAGGGCCUGC |
| siRNA 715 | 715 | CAGGCCCUGAGCUGACGUG | 3739 | CACGUCAGCUCAGGGCCUG |
| siRNA 716 | 716 | AGGCCCUGAGCUGACGUGU | 3740 | ACACGUCAGCUCAGGGCCU |
| siRNA 717 | 717 | GGCCCUGAGCUGACGUGUG | 3741 | CACACGUCAGCUCAGGGCC |
| siRNA 718 | 718 | GCCCUGAGCUGACGUGUGG | 3742 | CCACACGUCAGCUCAGGGC |
| siRNA 719 | 719 | CCCUGAGCUGACGUGUGGA | 3743 | UCCACACGUCAGCUCAGGG |
| siRNA 720 | 720 | CCUGAGCUGACGUGUGGAG | 3744 | CUCCACACGUCAGCUCAGG |
| siRNA 721 | 721 | CUGAGCUGACGUGUGGAGC | 3745 | GCUCCACACGUCAGCUCAG |
| siRNA 722 | 722 | UGAGCUGACGUGUGGAGCC | 3746 | GGCUCCACACGUCAGCUCA |
| siRNA 723 | 723 | GAGCUGACGUGUGGAGCCA | 3747 | UGGCUCCACACGUCAGCUC |
| siRNA 724 | 724 | AGCUGACGUGUGGAGCCAG | 3748 | CUGGCUCCACACGUCAGCU |
| siRNA 725 | 725 | GCUGACGUGUGGAGCCAGA | 3749 | UCUGGCUCCACACGUCAGC |
| siRNA 726 | 726 | CUGACGUGUGGAGCCAGAG | 3750 | CUCUGGCUCCACACGUCAG |
| siRNA 727 | 727 | UGACGUGUGGAGCCAGAGC | 3751 | GCUCUGGCUCCACACGUCA |
| siRNA 728 | 728 | GACGUGUGGAGCCAGAGCC | 3752 | GGCUCUGGCUCCACACGUC |
| siRNA 729 | 729 | ACGUGUGGAGCCAGAGCCA | 3753 | UGGCUCUGGCUCCACACGU |
| siRNA 730 | 730 | CGUGUGGAGCCAGAGCCAC | 3754 | GUGGCUCUGGCUCCACACG |
| siRNA 731 | 731 | GUGUGGAGCCAGAGCCACC | 3755 | GGUGGCUCUGGCUCCACAC |
| siRNA 732 | 732 | UGUGGAGCCAGAGCCACCC | 3756 | GGGUGGCUCUGGCUCCACA |
| siRNA 733 | 733 | GUGGAGCCAGAGCCACCCA | 3757 | UGGGUGGCUCUGGCUCCAC |
| siRNA 734 | 734 | UGGAGCCAGAGCCACCCAA | 3758 | UUGGGUGGCUCUGGCUCCA |
| siRNA 735 | 735 | GGAGCCAGAGCCACCCAAU | 3759 | AUUGGGUGGCUCUGGCUCC |
| siRNA 736 | 736 | GAGCCAGAGCCACCCAAUC | 3760 | GAUUGGGUGGCUCUGGCUC |
| siRNA 737 | 737 | AGCCAGAGCCACCCAAUCC | 3761 | GGAUUGGGUGGCUCUGGCU |
| siRNA 738 | 738 | GCCAGAGCCACCCAAUCCC | 3762 | GGGAUUGGGUGGCUCUGGC |
| siRNA 739 | 739 | CCAGAGCCACCCAAUCCCG | 3763 | CGGGAUUGGGUGGCUCUGG |
| siRNA 740 | 740 | CAGAGCCACCCAAUCCCGU | 3764 | ACGGGAUUGGGUGGCUCUG |
| siRNA 741 | 741 | AGAGCCACCCAAUCCCGUA | 3765 | UACGGGAUUGGGUGGCUCU |
| siRNA 742 | 742 | GAGCCACCCAAUCCCGUAG | 3766 | CUACGGGAUUGGGUGGCUC |
| siRNA 743 | 743 | AGCCACCCAAUCCCGUAGG | 3767 | CCUACGGGAUUGGGUGGCU |
| siRNA 744 | 744 | GCCACCCAAUCCCGUAGGG | 3768 | CCCUACGGGAUUGGGUGGC |
| siRNA 745 | 745 | CCACCCAAUCCCGUAGGGA | 3769 | UCCCUACGGGAUUGGGUGG |
| siRNA 746 | 746 | CACCCAAUCCCGUAGGGAC | 3770 | GUCCCUACGGGAUUGGGUG |
| siRNA 747 | 747 | ACCCAAUCCCGUAGGGACA | 3771 | UGUCCCUACGGGAUUGGGU |
| siRNA 748 | 748 | CCCAAUCCCGUAGGGACAG | 3772 | CUGUCCCUACGGGAUUGGG |
| siRNA 749 | 749 | CCAAUCCCGUAGGGACAGG | 3773 | CCUGUCCCUACGGGAUUGG |
| siRNA 750 | 750 | CAAUCCCGUAGGGACAGGU | 3774 | ACCUGUCCCUACGGGAUUG |
| siRNA 751 | 751 | AAUCCCGUAGGGACAGGUU | 3775 | AACCUGUCCCUACGGGAUU |
| siRNA 752 | 752 | AUCCCGUAGGGACAGGUUU | 3776 | AAACCUGUCCCUACGGGAU |
| siRNA 753 | 753 | UCCCGUAGGGACAGGUUUC | 3777 | GAAACCUGUCCCUACGGGA |
| siRNA 754 | 754 | CCCGUAGGGACAGGUUUCA | 3778 | UGAAACCUGUCCCUACGGG |
| siRNA 755 | 755 | CCGUAGGGACAGGUUUCAC | 3779 | GUGAAACCUGUCCCUACGG |
| siRNA 756 | 756 | CGUAGGGACAGGUUUCACA | 3780 | UGUGAAACCUGUCCCUACG |
| siRNA 757 | 757 | GUAGGGACAGGUUUCACAA | 3781 | UUGUGAAACCUGUCCCUAC |
| siRNA 758 | 758 | UAGGGACAGGUUUCACAAC | 3782 | GUUGUGAAACCUGUCCCUA |
| siRNA 759 | 759 | AGGGACAGGUUUCACAACU | 3783 | AGUUGUGAAACCUGUCCCU |
| siRNA 760 | 760 | GGGACAGGUUUCACAACUU | 3784 | AAGUUGUGAAACCUGUCCC |
| siRNA 761 | 761 | GGACAGGUUUCACAACUUC | 3785 | GAAGUUGUGAAACCUGUCC |
| siRNA 762 | 762 | GACAGGUUUCACAACUUCC | 3786 | GGAAGUUGUGAAACCUGUC |
| siRNA 763 | 763 | ACAGGUUUCACAACUUCCC | 3787 | GGGAAGUUGUGAAACCUGU |
| siRNA 764 | 764 | CAGGUUUCACAACUUCCCG | 3788 | CGGGAAGUUGUGAAACCUG |
| siRNA 765 | 765 | AGGUUUCACAACUUCCCGG | 3789 | CCGGGAAGUUGUGAAACCU |
| siRNA 766 | 766 | GGUUUCACAACUUCCCGGA | 3790 | UCCGGGAAGUUGUGAAACC |
| siRNA 767 | 767 | GUUUCACAACUUCCCGGAU | 3791 | AUCCGGGAAGUUGUGAAAC |
| siRNA 768 | 768 | UUUCACAACUUCCCGGAUG | 3792 | CAUCCGGGAAGUUGUGAAA |
| siRNA 769 | 769 | UUCACAACUUCCCGGAUGG | 3793 | CCAUCCGGGAAGUUGUGAA |
| siRNA 770 | 770 | UCACAACUUCCCGGAUGGG | 3794 | CCCAUCCGGGAAGUUGUGA |
| siRNA 771 | 771 | CACAACUUCCCGGAUGGGG | 3795 | CCCCAUCCGGGAAGUUGUG |
| siRNA 772 | 772 | ACAACUUCCCGGAUGGGGC | 3796 | GCCCCAUCCGGGAAGUUGU |
| siRNA 773 | 773 | CAACUUCCCGGAUGGGGCU | 3797 | AGCCCCAUCCGGGAAGUUG |
| siRNA 774 | 774 | AACUUCCCGGAUGGGGCUG | 3798 | CAGCCCCAUCCGGGAAGUU |
| siRNA 775 | 775 | ACUUCCCGGAUGGGGCUGU | 3799 | ACAGCCCCAUCCGGGAAGU |
| siRNA 776 | 776 | CUUCCCGGAUGGGGCUGUG | 3800 | CACAGCCCCAUCCGGGAAG |
| siRNA 777 | 777 | UUCCCGGAUGGGGCUGUGG | 3801 | CCACAGCCCCAUCCGGGAA |
| siRNA 778 | 778 | UCCCGGAUGGGGCUGUGGU | 3802 | ACCACAGCCCCAUCCGGGA |
| siRNA 779 | 779 | CCCGGAUGGGGCUGUGGUG | 3803 | CACCACAGCCCCAUCCGGG |
| siRNA 780 | 780 | CCGGAUGGGGCUGUGGUGG | 3804 | CCACCACAGCCCCAUCCGG |
| siRNA 781 | 781 | CGGAUGGGGCUGUGGUGGG | 3805 | CCCACCACAGCCCCAUCCG |
| siRNA 782 | 782 | GGAUGGGGCUGUGGUGGGU | 3806 | ACCCACCACAGCCCCAUCC |
| siRNA 783 | 783 | GAUGGGGCUGUGGUGGGUC | 3807 | GACCCACCACAGCCCCAUC |
| siRNA 784 | 784 | AUGGGGCUGUGGUGGGUCA | 3808 | UGACCCACCACAGCCCCAU |
| siRNA 785 | 785 | UGGGGCUGUGGUGGGUCAC | 3809 | GUGACCCACCACAGCCCCA |
| siRNA 786 | 786 | GGGGCUGUGGUGGGUCACA | 3810 | UGUGACCCACCACAGCCCC |
| siRNA 787 | 787 | GGGCUGUGGUGGGUCACAG | 3811 | CUGUGACCCACCACAGCCC |
| siRNA 788 | 788 | GGCUGUGGUGGGUCACAGU | 3812 | ACUGUGACCCACCACAGCC |
| siRNA 789 | 789 | GCUGUGGUGGGUCACAGUG | 3813 | CACUGUGACCCACCACAGC |
| siRNA 790 | 790 | CUGUGGUGGGUCACAGUGC | 3814 | GCACUGUGACCCACCACAG |
| siRNA 791 | 791 | UGUGGUGGGUCACAGUGCA | 3815 | UGCACUGUGACCCACCACA |
| siRNA 792 | 792 | GUGGUGGGUCACAGUGCAG | 3816 | CUGCACUGUGACCCACCAC |
| siRNA 793 | 793 | UGGUGGGUCACAGUGCAGC | 3817 | GCUGCACUGUGACCCACCA |
| siRNA 794 | 794 | GGUGGGUCACAGUGCAGCC | 3818 | GGCUGCACUGUGACCCACC |
| siRNA 795 | 795 | GUGGGUCACAGUGCAGCCU | 3819 | AGGCUGCACUGUGACCCAC |
| siRNA 796 | 796 | UGGGUCACAGUGCAGCCUC | 3820 | GAGGCUGCACUGUGACCCA |
| siRNA 797 | 797 | GGGUCACAGUGCAGCCUCC | 3821 | GGAGGCUGCACUGUGACCC |
| siRNA 798 | 798 | GGUCACAGUGCAGCCUCCA | 3822 | UGGAGGCUGCACUGUGACC |
| siRNA 799 | 799 | GUCACAGUGCAGCCUCCAG | 3823 | CUGGAGGCUGCACUGUGAC |
| siRNA 800 | 800 | UCACAGUGCAGCCUCCAGC | 3824 | GCUGGAGGCUGCACUGUGA |
| siRNA 801 | 801 | CACAGUGCAGCCUCCAGCC | 3825 | GGCUGGAGGCUGCACUGUG |
| siRNA 802 | 802 | ACAGUGCAGCCUCCAGCCA | 3826 | UGGCUGGAGGCUGCACUGU |
| siRNA 803 | 803 | CAGUGCAGCCUCCAGCCAG | 3827 | CUGGCUGGAGGCUGCACUG |
| siRNA 804 | 804 | AGUGCAGCCUCCAGCCAGA | 3828 | UCUGGCUGGAGGCUGCACU |
| siRNA 805 | 805 | GUGCAGCCUCCAGCCAGAA | 3829 | UUCUGGCUGGAGGCUGCAC |
| siRNA 806 | 806 | UGCAGCCUCCAGCCAGAAG | 3830 | CUUCUGGCUGGAGGCUGCA |
| siRNA 807 | 807 | GCAGCCUCCAGCCAGAAGG | 3831 | CCUUCUGGCUGGAGGCUGC |
| siRNA 808 | 808 | CAGCCUCCAGCCAGAAGGA | 3832 | UCCUUCUGGCUGGAGGCUG |
| siRNA 809 | 809 | AGCCUCCAGCCAGAAGGAU | 3833 | AUCCUUCUGGCUGGAGGCU |
| siRNA 810 | 810 | GCCUCCAGCCAGAAGGAUG | 3834 | CAUCCUUCUGGCUGGAGGC |
| SIRNA 811 | 811 | CCUCCAGCCAGAAGGAUGG | 3835 | CCAUCCUUCUGGCUGGAGG |
| siRNA 812 | 812 | CUCCAGCCAGAAGGAUGGG | 3836 | CCCAUCCUUCUGGCUGGAG |
| siRNA 813 | 813 | UCCAGCCAGAAGGAUGGGG | 3837 | CCCCAUCCUUCUGGCUGGA |
| siRNA 814 | 814 | CCAGCCAGAAGGAUGGGGU | 3838 | ACCCCAUCCUUCUGGCUGG |
| siRNA 815 | 815 | CAGCCAGAAGGAUGGGGUG | 3839 | CACCCCAUCCUUCUGGCUG |
| siRNA 816 | 816 | AGCCAGAAGGAUGGGGUGG | 3840 | CCACCCCAUCCUUCUGGCU |
| siRNA 817 | 817 | GCCAGAAGGAUGGGGUGGC | 3841 | GCCACCCCAUCCUUCUGGC |
| siRNA 818 | 818 | CCAGAAGGAUGGGGUGGCU | 3842 | AGCCACCCCAUCCUUCUGG |
| siRNA 819 | 819 | CAGAAGGAUGGGGUGGCUC | 3843 | GAGCCACCCCAUCCUUCUG |
| siRNA 820 | 820 | AGAAGGAUGGGGUGGCUCC | 3844 | GGAGCCACCCCAUCCUUCU |
| siRNA 821 | 821 | GAAGGAUGGGGUGGCUCCC | 3845 | GGGAGCCACCCCAUCCUUC |
| siRNA 822 | 822 | AAGGAUGGGGUGGCUCCCA | 3846 | UGGGAGCCACCCCAUCCUU |
| siRNA 823 | 823 | AGGAUGGGGUGGCUCCCAC | 3847 | GUGGGAGCCACCCCAUCCU |
| siRNA 824 | 824 | GGAUGGGGUGGCUCCCACU | 3848 | AGUGGGAGCCACCCCAUCC |
| siRNA 825 | 825 | GAUGGGGUGGCUCCCACUC | 3849 | GAGUGGGAGCCACCCCAUC |
| siRNA 826 | 826 | AUGGGGUGGCUCCCACUCC | 3850 | GGAGUGGGAGCCACCCCAU |
| siRNA 827 | 827 | UGGGGUGGCUCCCACUCCU | 3851 | AGGAGUGGGAGCCACCCCA |
| siRNA 828 | 828 | GGGGUGGCUCCCACUCCUG | 3852 | CAGGAGUGGGAGCCACCCC |
| siRNA 829 | 829 | GGGUGGCUCCCACUCCUGC | 3853 | GCAGGAGUGGGAGCCACCC |
| siRNA 830 | 830 | GGUGGCUCCCACUCCUGCU | 3854 | AGCAGGAGUGGGAGCCACC |
| siRNA 831 | 831 | GUGGCUCCCACUCCUGCUG | 3855 | CAGCAGGAGUGGGAGCCAC |
| siRNA 832 | 832 | UGGCUCCCACUCCUGCUGC | 3856 | GCAGCAGGAGUGGGAGCCA |
| siRNA 833 | 833 | GGCUCCCACUCCUGCUGCU | 3857 | AGCAGCAGGAGUGGGAGCC |
| siRNA 834 | 834 | GCUCCCACUCCUGCUGCUU | 3858 | AAGCAGCAGGAGUGGGAGC |
| siRNA 835 | 835 | CUCCCACUCCUGCUGCUUC | 3859 | GAAGCAGCAGGAGUGGGAG |
| siRNA 836 | 836 | UCCCACUCCUGCUGCUUCU | 3860 | AGAAGCAGCAGGAGUGGGA |
| siRNA 837 | 837 | CCCACUCCUGCUGCUUCUG | 3861 | CAGAAGCAGCAGGAGUGGG |
| siRNA 838 | 838 | CCACUCCUGCUGCUUCUGA | 3862 | UCAGAAGCAGCAGGAGUGG |
| siRNA 839 | 839 | CACUCCUGCUGCUUCUGAC | 3863 | GUCAGAAGCAGCAGGAGUG |
| siRNA 840 | 840 | ACUCCUGCUGCUUCUGACU | 3864 | AGUCAGAAGCAGCAGGAGU |
| siRNA 841 | 841 | CUCCUGCUGCUUCUGACUC | 3865 | GAGUCAGAAGCAGCAGGAG |
| siRNA 842 | 842 | UCCUGCUGCUUCUGACUCA | 3866 | UGAGUCAGAAGCAGCAGGA |
| siRNA 843 | 843 | CCUGCUGCUUCUGACUCAA | 3867 | UUGAGUCAGAAGCAGCAGG |
| siRNA 844 | 844 | CUGCUGCUUCUGACUCAAU | 3868 | AUUGAGUCAGAAGCAGCAG |
| siRNA 845 | 845 | UGCUGCUUCUGACUCAAUG | 3869 | CAUUGAGUCAGAAGCAGCA |
| siRNA 846 | 846 | GCUGCUUCUGACUCAAUGC | 3870 | GCAUUGAGUCAGAAGCAGC |
| siRNA 847 | 847 | CUGCUUCUGACUCAAUGCU | 3871 | AGCAUUGAGUCAGAAGCAG |
| siRNA 848 | 848 | UGCUUCUGACUCAAUGCUU | 3872 | AAGCAUUGAGUCAGAAGCA |
| siRNA 849 | 849 | GCUUCUGACUCAAUGCUUA | 3873 | UAAGCAUUGAGUCAGAAGC |
| siRNA 850 | 850 | CUUCUGACUCAAUGCUUAG | 3874 | CUAAGCAUUGAGUCAGAAG |
| siRNA 851 | 851 | UUCUGACUCAAUGCUUAGG | 3875 | CCUAAGCAUUGAGUCAGAA |
| siRNA 852 | 852 | UCUGACUCAAUGCUUAGGG | 3876 | CCCUAAGCAUUGAGUCAGA |
| siRNA 853 | 853 | CUGACUCAAUGCUUAGGGG | 3877 | CCCCUAAGCAUUGAGUCAG |
| siRNA 854 | 854 | UGACUCAAUGCUUAGGGGU | 3878 | ACCCCUAAGCAUUGAGUCA |
| siRNA 855 | 855 | GACUCAAUGCUUAGGGGUC | 3879 | GACCCCUAAGCAUUGAGUC |
| siRNA 856 | 856 | ACUCAAUGCUUAGGGGUCC | 3880 | GGACCCCUAAGCAUUGAGU |
| siRNA 857 | 857 | CUCAAUGCUUAGGGGUCCC | 3881 | GGGACCCCUAAGCAUUGAG |
| siRNA 858 | 858 | UCAAUGCUUAGGGGUCCCU | 3882 | AGGGACCCCUAAGCAUUGA |
| siRNA 859 | 859 | CAAUGCUUAGGGGUCCCUG | 3883 | CAGGGACCCCUAAGCAUUG |
| siRNA 860 | 860 | AAUGCUUAGGGGUCCCUGG | 3884 | CCAGGGACCCCUAAGCAUU |
| siRNA 861 | 861 | AUGCUUAGGGGUCCCUGGG | 3885 | CCCAGGGACCCCUAAGCAU |
| siRNA 862 | 862 | UGCUUAGGGGUCCCUGGGC | 3886 | GCCCAGGGACCCCUAAGCA |
| siRNA 863 | 863 | GCUUAGGGGUCCCUGGGCA | 3887 | UGCCCAGGGACCCCUAAGC |
| siRNA 864 | 864 | CUUAGGGGUCCCUGGGCAG | 3888 | CUGCCCAGGGACCCCUAAG |
| siRNA 865 | 865 | UUAGGGGUCCCUGGGCAGC | 3889 | GCUGCCCAGGGACCCCUAA |
| siRNA 866 | 866 | UAGGGGUCCCUGGGCAGCG | 3890 | CGCUGCCCAGGGACCCCUA |
| siRNA 867 | 867 | AGGGGUCCCUGGGCAGCGC | 3891 | GCGCUGCCCAGGGACCCCU |
| siRNA 868 | 868 | GGGGUCCCUGGGCAGCGCU | 3892 | AGCGCUGCCCAGGGACCCC |
| siRNA 869 | 869 | GGGUCCCUGGGCAGCGCUC | 3893 | GAGCGCUGCCCAGGGACCC |
| siRNA 870 | 870 | GGUCCCUGGGCAGCGCUCG | 3894 | CGAGCGCUGCCCAGGGACC |
| siRNA 871 | 871 | GUCCCUGGGCAGCGCUCGC | 3895 | GCGAGCGCUGCCCAGGGAC |
| siRNA 872 | 872 | UCCCUGGGCAGCGCUCGCC | 3896 | GGCGAGCGCUGCCCAGGGA |
| siRNA 873 | 873 | CCCUGGGCAGCGCUCGCCA | 3897 | UGGCGAGCGCUGCCCAGGG |
| siRNA 874 | 874 | CCUGGGCAGCGCUCGCCAU | 3898 | AUGGCGAGCGCUGCCCAGG |
| siRNA 875 | 875 | CUGGGCAGCGCUCGCCAUU | 3899 | AAUGGCGAGCGCUGCCCAG |
| siRNA 876 | 876 | UGGGCAGCGCUCGCCAUUG | 3900 | CAAUGGCGAGCGCUGCCCA |
| siRNA 877 | 877 | GGGCAGCGCUCGCCAUUGA | 3901 | UCAAUGGCGAGCGCUGCCC |
| siRNA 878 | 878 | GGCAGCGCUCGCCAUUGAA | 3902 | UUCAAUGGCGAGCGCUGCC |
| siRNA 879 | 879 | GCAGCGCUCGCCAUUGAAU | 3903 | AUUCAAUGGCGAGCGCUGC |
| siRNA 880 | 880 | CAGCGCUCGCCAUUGAAUG | 3904 | CAUUCAAUGGCGAGCGCUG |
| siRNA 881 | 881 | AGCGCUCGCCAUUGAAUGA | 3905 | UCAUUCAAUGGCGAGCGCU |
| siRNA 882 | 882 | GCGCUCGCCAUUGAAUGAC | 3906 | GUCAUUCAAUGGCGAGCGC |
| SIRNA 883 | 883 | CGCUCGCCAUUGAAUGACU | 3907 | AGUCAUUCAAUGGCGAGCG |
| siRNA 884 | 884 | GCUCGCCAUUGAAUGACUU | 3908 | AAGUCAUUCAAUGGCGAGC |
| siRNA 885 | 885 | CUCGCCAUUGAAUGACUUC | 3909 | GAAGUCAUUCAAUGGCGAG |
| siRNA 886 | 886 | UCGCCAUUGAAUGACUUCC | 3910 | GGAAGUCAUUCAAUGGCGA |
| siRNA 887 | 887 | CGCCAUUGAAUGACUUCCA | 3911 | UGGAAGUCAUUCAAUGGCG |
| siRNA 888 | 888 | GCCAUUGAAUGACUUCCAA | 3912 | UUGGAAGUCAUUCAAUGGC |
| siRNA 889 | 889 | CCAUUGAAUGACUUCCAAG | 3913 | CUUGGAAGUCAUUCAAUGG |
| siRNA 890 | 890 | CAUUGAAUGACUUCCAAGU | 3914 | ACUUGGAAGUCAUUCAAUG |
| siRNA 891 | 891 | AUUGAAUGACUUCCAAGUG | 3915 | CACUUGGAAGUCAUUCAAU |
| siRNA 892 | 892 | UUGAAUGACUUCCAAGUGC | 3916 | GCACUUGGAAGUCAUUCAA |
| siRNA 893 | 893 | UGAAUGACUUCCAAGUGCU | 3917 | AGCACUUGGAAGUCAUUCA |
| siRNA 894 | 894 | GAAUGACUUCCAAGUGCUC | 3918 | GAGCACUUGGAAGUCAUUC |
| siRNA 895 | 895 | AAUGACUUCCAAGUGCUCC | 3919 | GGAGCACUUGGAAGUCAUU |
| siRNA 896 | 896 | AUGACUUCCAAGUGCUCCG | 3920 | CGGAGCACUUGGAAGUCAU |
| siRNA 897 | 897 | UGACUUCCAAGUGCUCCGG | 3921 | CCGGAGCACUUGGAAGUCA |
| siRNA 898 | 898 | GACUUCCAAGUGCUCCGGG | 3922 | CCCGGAGCACUUGGAAGUC |
| siRNA 899 | 899 | ACUUCCAAGUGCUCCGGGG | 3923 | CCCCGGAGCACUUGGAAGU |
| siRNA 900 | 900 | CUUCCAAGUGCUCCGGGGC | 3924 | GCCCCGGAGCACUUGGAAG |
| siRNA 901 | 901 | UUCCAAGUGCUCCGGGGCA | 3925 | UGCCCCGGAGCACUUGGAA |
| siRNA 902 | 902 | UCCAAGUGCUCCGGGGCAC | 3926 | GUGCCCCGGAGCACUUGGA |
| siRNA 903 | 903 | CCAAGUGCUCCGGGGCACA | 3927 | UGUGCCCCGGAGCACUUGG |
| siRNA 904 | 904 | CAAGUGCUCCGGGGCACAG | 3928 | CUGUGCCCCGGAGCACUUG |
| siRNA 905 | 905 | AAGUGCUCCGGGGCACAGA | 3929 | UCUGUGCCCCGGAGCACUU |
| siRNA 906 | 906 | AGUGCUCCGGGGCACAGAG | 3930 | CUCUGUGCCCCGGAGCACU |
| siRNA 907 | 907 | GUGCUCCGGGGCACAGAGC | 3931 | GCUCUGUGCCCCGGAGCAC |
| siRNA 908 | 908 | UGCUCCGGGGCACAGAGCU | 3932 | AGCUCUGUGCCCCGGAGCA |
| siRNA 909 | 909 | GCUCCGGGGCACAGAGCUA | 3933 | UAGCUCUGUGCCCCGGAGC |
| siRNA 910 | 910 | CUCCGGGGCACAGAGCUAC | 3934 | GUAGCUCUGUGCCCCGGAG |
| siRNA 911 | 911 | UCCGGGGCACAGAGCUACA | 3935 | UGUAGCUCUGUGCCCCGGA |
| siRNA 912 | 912 | CCGGGGCACAGAGCUACAG | 3936 | CUGUAGCUCUGUGCCCCGG |
| SIRNA 913 | 913 | CGGGGCACAGAGCUACAGC | 3937 | GCUGUAGCUCUGUGCCCCG |
| siRNA 914 | 914 | GGGGCACAGAGCUACAGCA | 3938 | UGCUGUAGCUCUGUGCCCC |
| siRNA 915 | 915 | GGGCACAGAGCUACAGCAC | 3939 | GUGCUGUAGCUCUGUGCCC |
| siRNA 916 | 916 | GGCACAGAGCUACAGCACC | 3940 | GGUGCUGUAGCUCUGUGCC |
| siRNA 917 | 917 | GCACAGAGCUACAGCACCU | 3941 | AGGUGCUGUAGCUCUGUGC |
| siRNA 918 | 918 | CACAGAGCUACAGCACCUG | 3942 | CAGGUGCUGUAGCUCUGUG |
| siRNA 919 | 919 | ACAGAGCUACAGCACCUGC | 3943 | GCAGGUGCUGUAGCUCUGU |
| siRNA 920 | 920 | CAGAGCUACAGCACCUGCU | 3944 | AGCAGGUGCUGUAGCUCUG |
| siRNA 921 | 921 | AGAGCUACAGCACCUGCUA | 3945 | UAGCAGGUGCUGUAGCUCU |
| siRNA 922 | 922 | GAGCUACAGCACCUGCUAC | 3946 | GUAGCAGGUGCUGUAGCUC |
| siRNA 923 | 923 | AGCUACAGCACCUGCUACA | 3947 | UGUAGCAGGUGCUGUAGCU |
| siRNA 924 | 924 | GCUACAGCACCUGCUACAU | 3948 | AUGUAGCAGGUGCUGUAGC |
| siRNA 925 | 925 | CUACAGCACCUGCUACAUG | 3949 | CAUGUAGCAGGUGCUGUAG |
| siRNA 926 | 926 | UACAGCACCUGCUACAUGC | 3950 | GCAUGUAGCAGGUGCUGUA |
| siRNA 927 | 927 | ACAGCACCUGCUACAUGCG | 3951 | CGCAUGUAGCAGGUGCUGU |
| siRNA 928 | 928 | CAGCACCUGCUACAUGCGG | 3952 | CCGCAUGUAGCAGGUGCUG |
| siRNA 929 | 929 | AGCACCUGCUACAUGCGGU | 3953 | ACCGCAUGUAGCAGGUGCU |
| siRNA 930 | 930 | GCACCUGCUACAUGCGGUG | 3954 | CACCGCAUGUAGCAGGUGC |
| siRNA 931 | 931 | CACCUGCUACAUGCGGUGG | 3955 | CCACCGCAUGUAGCAGGUG |
| siRNA 932 | 932 | ACCUGCUACAUGCGGUGGU | 3956 | ACCACCGCAUGUAGCAGGU |
| siRNA 933 | 933 | CCUGCUACAUGCGGUGGUG | 3957 | CACCACCGCAUGUAGCAGG |
| siRNA 934 | 934 | CUGCUACAUGCGGUGGUGC | 3958 | GCACCACCGCAUGUAGCAG |
| siRNA 935 | 935 | UGCUACAUGCGGUGGUGCC | 3959 | GGCACCACCGCAUGUAGCA |
| siRNA 936 | 936 | GCUACAUGCGGUGGUGCCC | 3960 | GGGCACCACCGCAUGUAGC |
| siRNA 937 | 937 | CUACAUGCGGUGGUGCCCG | 3961 | CGGGCACCACCGCAUGUAG |
| siRNA 938 | 938 | UACAUGCGGUGGUGCCCGG | 3962 | CCGGGCACCACCGCAUGUA |
| siRNA 939 | 939 | ACAUGCGGUGGUGCCCGGG | 3963 | CCCGGGCACCACCGCAUGU |
| siRNA 940 | 940 | CAUGCGGUGGUGCCCGGGC | 3964 | GCCCGGGCACCACCGCAUG |
| siRNA 941 | 941 | AUGCGGUGGUGCCCGGGCC | 3965 | GGCCCGGGCACCACCGCAU |
| siRNA 942 | 942 | UGCGGUGGUGCCCGGGCCU | 3966 | AGGCCCGGGCACCACCGCA |
| siRNA 943 | 943 | GCGGUGGUGCCCGGGCCUU | 3967 | AAGGCCCGGGCACCACCGC |
| siRNA 944 | 944 | CGGUGGUGCCCGGGCCUUG | 3968 | CAAGGCCCGGGCACCACCG |
| siRNA 945 | 945 | GGUGGUGCCCGGGCCUUGG | 3969 | CCAAGGCCCGGGCACCACC |
| siRNA 946 | 946 | GUGGUGCCCGGGCCUUGGC | 3970 | GCCAAGGCCCGGGCACCAC |
| siRNA 947 | 947 | UGGUGCCCGGGCCUUGGCA | 3971 | UGCCAAGGCCCGGGCACCA |
| siRNA 948 | 948 | GGUGCCCGGGCCUUGGCAG | 3972 | CUGCCAAGGCCCGGGCACC |
| siRNA 949 | 949 | GUGCCCGGGCCUUGGCAGG | 3973 | CCUGCCAAGGCCCGGGCAC |
| siRNA 950 | 950 | UGCCCGGGCCUUGGCAGGA | 3974 | UCCUGCCAAGGCCCGGGCA |
| siRNA 951 | 951 | GCCCGGGCCUUGGCAGGAG | 3975 | CUCCUGCCAAGGCCCGGGC |
| siRNA 952 | 952 | CCCGGGCCUUGGCAGGAGG | 3976 | CCUCCUGCCAAGGCCCGGG |
| siRNA 953 | 953 | CCGGGCCUUGGCAGGAGGA | 3977 | UCCUCCUGCCAAGGCCCGG |
| siRNA 954 | 954 | CGGGCCUUGGCAGGAGGAU | 3978 | AUCCUCCUGCCAAGGCCCG |
| siRNA 955 | 955 | GGGCCUUGGCAGGAGGAUG | 3979 | CAUCCUCCUGCCAAGGCCC |
| siRNA 956 | 956 | GGCCUUGGCAGGAGGAUGU | 3980 | ACAUCCUCCUGCCAAGGCC |
| siRNA 957 | 957 | GCCUUGGCAGGAGGAUGUG | 3981 | CACAUCCUCCUGCCAAGGC |
| siRNA 958 | 958 | CCUUGGCAGGAGGAUGUGG | 3982 | CCACAUCCUCCUGCCAAGG |
| siRNA 959 | 959 | CUUGGCAGGAGGAUGUGGC | 3983 | GCCACAUCCUCCUGCCAAG |
| siRNA 960 | 960 | UUGGCAGGAGGAUGUGGCA | 3984 | UGCCACAUCCUCCUGCCAA |
| siRNA 961 | 961 | UGGCAGGAGGAUGUGGCAG | 3985 | CUGCCACAUCCUCCUGCCA |
| siRNA 962 | 962 | GGCAGGAGGAUGUGGCAGA | 3986 | UCUGCCACAUCCUCCUGCC |
| siRNA 963 | 963 | GCAGGAGGAUGUGGCAGAU | 3987 | AUCUGCCACAUCCUCCUGC |
| siRNA 964 | 964 | CAGGAGGAUGUGGCAGAUG | 3988 | CAUCUGCCACAUCCUCCUG |
| siRNA 965 | 965 | AGGAGGAUGUGGCAGAUGC | 3989 | GCAUCUGCCACAUCCUCCU |
| siRNA 966 | 966 | GGAGGAUGUGGCAGAUGCU | 3990 | AGCAUCUGCCACAUCCUCC |
| siRNA 967 | 967 | GAGGAUGUGGCAGAUGCUG | 3991 | CAGCAUCUGCCACAUCCUC |
| siRNA 968 | 968 | AGGAUGUGGCAGAUGCUGA | 3992 | UCAGCAUCUGCCACAUCCU |
| siRNA 969 | 969 | GGAUGUGGCAGAUGCUGAA | 3993 | UUCAGCAUCUGCCACAUCC |
| siRNA 970 | 970 | GAUGUGGCAGAUGCUGAAG | 3994 | CUUCAGCAUCUGCCACAUC |
| siRNA 971 | 971 | AUGUGGCAGAUGCUGAAGA | 3995 | UCUUCAGCAUCUGCCACAU |
| siRNA 972 | 972 | UGUGGCAGAUGCUGAAGAG | 3996 | CUCUUCAGCAUCUGCCACA |
| siRNA 973 | 973 | GUGGCAGAUGCUGAAGAGU | 3997 | ACUCUUCAGCAUCUGCCAC |
| siRNA 974 | 974 | UGGCAGAUGCUGAAGAGUG | 3998 | CACUCUUCAGCAUCUGCCA |
| siRNA 975 | 975 | GGCAGAUGCUGAAGAGUGU | 3999 | ACACUCUUCAGCAUCUGCC |
| siRNA 976 | 976 | GCAGAUGCUGAAGAGUGUG | 4000 | CACACUCUUCAGCAUCUGC |
| siRNA 977 | 977 | CAGAUGCUGAAGAGUGUGC | 4001 | GCACACUCUUCAGCAUCUG |
| siRNA 978 | 978 | AGAUGCUGAAGAGUGUGCU | 4002 | AGCACACUCUUCAGCAUCU |
| siRNA 979 | 979 | GAUGCUGAAGAGUGUGCUG | 4003 | CAGCACACUCUUCAGCAUC |
| siRNA 980 | 980 | AUGCUGAAGAGUGUGCUGG | 4004 | CCAGCACACUCUUCAGCAU |
| siRNA 981 | 981 | UGCUGAAGAGUGUGCUGGU | 4005 | ACCAGCACACUCUUCAGCA |
| siRNA 982 | 982 | GCUGAAGAGUGUGCUGGUC | 4006 | GACCAGCACACUCUUCAGC |
| siRNA 983 | 983 | CUGAAGAGUGUGCUGGUCG | 4007 | CGACCAGCACACUCUUCAG |
| siRNA 984 | 984 | UGAAGAGUGUGCUGGUCGC | 4008 | GCGACCAGCACACUCUUCA |
| siRNA 985 | 985 | GAAGAGUGUGCUGGUCGCU | 4009 | AGCGACCAGCACACUCUUC |
| siRNA 986 | 986 | AAGAGUGUGCUGGUCGCUG | 4010 | CAGCGACCAGCACACUCUU |
| siRNA 987 | 987 | AGAGUGUGCUGGUCGCUGU | 4011 | ACAGCGACCAGCACACUCU |
| siRNA 988 | 988 | GAGUGUGCUGGUCGCUGUG | 4012 | CACAGCGACCAGCACACUC |
| siRNA 989 | 989 | AGUGUGCUGGUCGCUGUGG | 4013 | CCACAGCGACCAGCACACU |
| siRNA 990 | 990 | GUGUGCUGGUCGCUGUGGG | 4014 | CCCACAGCGACCAGCACAC |
| siRNA 991 | 991 | UGUGCUGGUCGCUGUGGGC | 4015 | GCCCACAGCGACCAGCACA |
| siRNA 992 | 992 | GUGCUGGUCGCUGUGGGCC | 4016 | GGCCCACAGCGACCAGCAC |
| siRNA 993 | 993 | UGCUGGUCGCUGUGGGCCC | 4017 | GGGCCCACAGCGACCAGCA |
| siRNA 994 | 994 | GCUGGUCGCUGUGGGCCCU | 4018 | AGGGCCCACAGCGACCAGC |
| siRNA 995 | 995 | CUGGUCGCUGUGGGCCCUU | 4019 | AAGGGCCCACAGCGACCAG |
| siRNA 996 | 996 | UGGUCGCUGUGGGCCCUUA | 4020 | UAAGGGCCCACAGCGACCA |
| siRNA 997 | 997 | GGUCGCUGUGGGCCCUUAA | 4021 | UUAAGGGCCCACAGCGACC |
| siRNA 998 | 998 | GUCGCUGUGGGCCCUUAAU | 4022 | AUUAAGGGCCCACAGCGAC |
| siRNA 999 | 999 | UCGCUGUGGGCCCUUAAUG | 4023 | CAUUAAGGGCCCACAGCGA |
| siRNA 1000 | 1000 | CGCUGUGGGCCCUUAAUGG | 4024 | CCAUUAAGGGCCCACAGCG |
| siRNA 1001 | 1001 | GCUGUGGGCCCUUAAUGGA | 4025 | UCCAUUAAGGGCCCACAGC |
| siRNA 1002 | 1002 | CUGUGGGCCCUUAAUGGAC | 4026 | GUCCAUUAAGGGCCCACAG |
| siRNA 1003 | 1003 | UGUGGGCCCUUAAUGGACU | 4027 | AGUCCAUUAAGGGCCCACA |
| siRNA 1004 | 1004 | GUGGGCCCUUAAUGGACUG | 4028 | CAGUCCAUUAAGGGCCCAC |
| siRNA 1005 | 1005 | UGGGCCCUUAAUGGACUGC | 4029 | GCAGUCCAUUAAGGGCCCA |
| siRNA 1006 | 1006 | GGGCCCUUAAUGGACUGCC | 4030 | GGCAGUCCAUUAAGGGCCC |
| siRNA 1007 | 1007 | GGCCCUUAAUGGACUGCCG | 4031 | CGGCAGUCCAUUAAGGGCC |
| siRNA 1008 | 1008 | GCCCUUAAUGGACUGCCGG | 4032 | CCGGCAGUCCAUUAAGGGC |
| siRNA 1009 | 1009 | CCCUUAAUGGACUGCCGGG | 4033 | CCCGGCAGUCCAUUAAGGG |
| siRNA 1010 | 1010 | CCUUAAUGGACUGCCGGGC | 4034 | GCCCGGCAGUCCAUUAAGG |
| siRNA 1011 | 1011 | CUUAAUGGACUGCCGGGCC | 4035 | GGCCCGGCAGUCCAUUAAG |
| siRNA 1012 | 1012 | UUAAUGGACUGCCGGGCCU | 4036 | AGGCCCGGCAGUCCAUUAA |
| siRNA 1013 | 1013 | UAAUGGACUGCCGGGCCUU | 4037 | AAGGCCCGGCAGUCCAUUA |
| siRNA 1014 | 1014 | AAUGGACUGCCGGGCCUUC | 4038 | GAAGGCCCGGCAGUCCAUU |
| siRNA 1015 | 1015 | AUGGACUGCCGGGCCUUCC | 4039 | GGAAGGCCCGGCAGUCCAU |
| siRNA 1016 | 1016 | UGGACUGCCGGGCCUUCCA | 4040 | UGGAAGGCCCGGCAGUCCA |
| siRNA 1017 | 1017 | GGACUGCCGGGCCUUCCAC | 4041 | GUGGAAGGCCCGGCAGUCC |
| siRNA 1018 | 1018 | GACUGCCGGGCCUUCCACU | 4042 | AGUGGAAGGCCCGGCAGUC |
| siRNA 1019 | 1019 | ACUGCCGGGCCUUCCACUA | 4043 | UAGUGGAAGGCCCGGCAGU |
| siRNA 1020 | 1020 | CUGCCGGGCCUUCCACUAC | 4044 | GUAGUGGAAGGCCCGGCAG |
| siRNA 1021 | 1021 | UGCCGGGCCUUCCACUACA | 4045 | UGUAGUGGAAGGCCCGGCA |
| siRNA 1022 | 1022 | GCCGGGCCUUCCACUACAA | 4046 | UUGUAGUGGAAGGCCCGGC |
| siRNA 1023 | 1023 | CCGGGCCUUCCACUACAAC | 4047 | GUUGUAGUGGAAGGCCCGG |
| siRNA 1024 | 1024 | CGGGCCUUCCACUACAACG | 4048 | CGUUGUAGUGGAAGGCCCG |
| siRNA 1025 | 1025 | GGGCCUUCCACUACAACGU | 4049 | ACGUUGUAGUGGAAGGCCC |
| siRNA 1026 | 1026 | GGCCUUCCACUACAACGUG | 4050 | CACGUUGUAGUGGAAGGCC |
| siRNA 1027 | 1027 | GCCUUCCACUACAACGUGA | 4051 | UCACGUUGUAGUGGAAGGC |
| siRNA 1028 | 1028 | CCUUCCACUACAACGUGAG | 4052 | CUCACGUUGUAGUGGAAGG |
| siRNA 1029 | 1029 | CUUCCACUACAACGUGAGC | 4053 | GCUCACGUUGUAGUGGAAG |
| siRNA 1030 | 1030 | UUCCACUACAACGUGAGCA | 4054 | UGCUCACGUUGUAGUGGAA |
| siRNA 1031 | 1031 | UCCACUACAACGUGAGCAG | 4055 | CUGCUCACGUUGUAGUGGA |
| siRNA 1032 | 1032 | CCACUACAACGUGAGCAGC | 4056 | GCUGCUCACGUUGUAGUGG |
| siRNA 1033 | 1033 | CACUACAACGUGAGCAGCC | 4057 | GGCUGCUCACGUUGUAGUG |
| siRNA 1034 | 1034 | ACUACAACGUGAGCAGCCA | 4058 | UGGCUGCUCACGUUGUAGU |
| siRNA 1035 | 1035 | CUACAACGUGAGCAGCCAU | 4059 | AUGGCUGCUCACGUUGUAG |
| siRNA 1036 | 1036 | UACAACGUGAGCAGCCAUG | 4060 | CAUGGCUGCUCACGUUGUA |
| siRNA 1037 | 1037 | ACAACGUGAGCAGCCAUGG | 4061 | CCAUGGCUGCUCACGUUGU |
| siRNA 1038 | 1038 | CAACGUGAGCAGCCAUGGU | 4062 | ACCAUGGCUGCUCACGUUG |
| siRNA 1039 | 1039 | AACGUGAGCAGCCAUGGUU | 4063 | AACCAUGGCUGCUCACGUU |
| siRNA 1040 | 1040 | ACGUGAGCAGCCAUGGUUG | 4064 | CAACCAUGGCUGCUCACGU |
| siRNA 1041 | 1041 | CGUGAGCAGCCAUGGUUGC | 4065 | GCAACCAUGGCUGCUCACG |
| siRNA 1042 | 1042 | GUGAGCAGCCAUGGUUGCC | 4066 | GGCAACCAUGGCUGCUCAC |
| siRNA 1043 | 1043 | UGAGCAGCCAUGGUUGCCA | 4067 | UGGCAACCAUGGCUGCUCA |
| siRNA 1044 | 1044 | GAGCAGCCAUGGUUGCCAA | 4068 | UUGGCAACCAUGGCUGCUC |
| siRNA 1045 | 1045 | AGCAGCCAUGGUUGCCAAC | 4069 | GUUGGCAACCAUGGCUGCU |
| siRNA 1046 | 1046 | GCAGCCAUGGUUGCCAACU | 4070 | AGUUGGCAACCAUGGCUGC |
| siRNA 1047 | 1047 | CAGCCAUGGUUGCCAACUG | 4071 | CAGUUGGCAACCAUGGCUG |
| siRNA 1048 | 1048 | AGCCAUGGUUGCCAACUGC | 4072 | GCAGUUGGCAACCAUGGCU |
| siRNA 1049 | 1049 | GCCAUGGUUGCCAACUGCU | 4073 | AGCAGUUGGCAACCAUGGC |
| siRNA 1050 | 1050 | CCAUGGUUGCCAACUGCUG | 4074 | CAGCAGUUGGCAACCAUGG |
| siRNA 1051 | 1051 | CAUGGUUGCCAACUGCUGC | 4075 | GCAGCAGUUGGCAACCAUG |
| siRNA 1052 | 1052 | AUGGUUGCCAACUGCUGCC | 4076 | GGCAGCAGUUGGCAACCAU |
| siRNA 1053 | 1053 | UGGUUGCCAACUGCUGCCA | 4077 | UGGCAGCAGUUGGCAACCA |
| siRNA 1054 | 1054 | GGUUGCCAACUGCUGCCAU | 4078 | AUGGCAGCAGUUGGCAACC |
| siRNA 1055 | 1055 | GUUGCCAACUGCUGCCAUG | 4079 | CAUGGCAGCAGUUGGCAAC |
| siRNA 1056 | 1056 | UUGCCAACUGCUGCCAUGG | 4080 | CCAUGGCAGCAGUUGGCAA |
| siRNA 1057 | 1057 | UGCCAACUGCUGCCAUGGA | 4081 | UCCAUGGCAGCAGUUGGCA |
| siRNA 1058 | 1058 | GCCAACUGCUGCCAUGGAC | 4082 | GUCCAUGGCAGCAGUUGGC |
| siRNA 1059 | 1059 | CCAACUGCUGCCAUGGACU | 4083 | AGUCCAUGGCAGCAGUUGG |
| siRNA 1060 | 1060 | CAACUGCUGCCAUGGACUC | 4084 | GAGUCCAUGGCAGCAGUUG |
| siRNA 1061 | 1061 | AACUGCUGCCAUGGACUCA | 4085 | UGAGUCCAUGGCAGCAGUU |
| siRNA 1062 | 1062 | ACUGCUGCCAUGGACUCAA | 4086 | UUGAGUCCAUGGCAGCAGU |
| siRNA 1063 | 1063 | CUGCUGCCAUGGACUCAAC | 4087 | GUUGAGUCCAUGGCAGCAG |
| siRNA 1064 | 1064 | UGCUGCCAUGGACUCAACA | 4088 | UGUUGAGUCCAUGGCAGCA |
| siRNA 1065 | 1065 | GCUGCCAUGGACUCAACAC | 4089 | GUGUUGAGUCCAUGGCAGC |
| siRNA 1066 | 1066 | CUGCCAUGGACUCAACACU | 4090 | AGUGUUGAGUCCAUGGCAG |
| siRNA 1067 | 1067 | UGCCAUGGACUCAACACUC | 4091 | GAGUGUUGAGUCCAUGGCA |
| siRNA 1068 | 1068 | GCCAUGGACUCAACACUCG | 4092 | CGAGUGUUGAGUCCAUGGC |
| siRNA 1069 | 1069 | CCAUGGACUCAACACUCGC | 4093 | GCGAGUGUUGAGUCCAUGG |
| siRNA 1070 | 1070 | CAUGGACUCAACACUCGCC | 4094 | GGCGAGUGUUGAGUCCAUG |
| siRNA 1071 | 1071 | AUGGACUCAACACUCGCCC | 4095 | GGGCGAGUGUUGAGUCCAU |
| siRNA 1072 | 1072 | UGGACUCAACACUCGCCCC | 4096 | GGGGCGAGUGUUGAGUCCA |
| siRNA 1073 | 1073 | GGACUCAACACUCGCCCCA | 4097 | UGGGGCGAGUGUUGAGUCC |
| siRNA 1074 | 1074 | GACUCAACACUCGCCCCAC | 4098 | GUGGGGCGAGUGUUGAGUC |
| siRNA 1075 | 1075 | ACUCAACACUCGCCCCACA | 4099 | UGUGGGGCGAGUGUUGAGU |
| siRNA 1076 | 1076 | CUCAACACUCGCCCCACAC | 4100 | GUGUGGGGCGAGUGUUGAG |
| siRNA 1077 | 1077 | UCAACACUCGCCCCACACG | 4101 | CGUGUGGGGCGAGUGUUGA |
| siRNA 1078 | 1078 | CAACACUCGCCCCACACGA | 4102 | UCGUGUGGGGCGAGUGUUG |
| siRNA 1079 | 1079 | AACACUCGCCCCACACGAG | 4103 | CUCGUGUGGGGCGAGUGUU |
| siRNA 1080 | 1080 | ACACUCGCCCCACACGAGG | 4104 | CCUCGUGUGGGGCGAGUGU |
| siRNA 1081 | 1081 | CACUCGCCCCACACGAGGC | 4105 | GCCUCGUGUGGGGCGAGUG |
| siRNA 1082 | 1082 | ACUCGCCCCACACGAGGCU | 4106 | AGCCUCGUGUGGGGCGAGU |
| siRNA 1083 | 1083 | CUCGCCCCACACGAGGCUG | 4107 | CAGCCUCGUGUGGGGCGAG |
| siRNA 1084 | 1084 | UCGCCCCACACGAGGCUGC | 4108 | GCAGCCUCGUGUGGGGCGA |
| siRNA 1085 | 1085 | CGCCCCACACGAGGCUGCG | 4109 | CGCAGCCUCGUGUGGGGCG |
| siRNA 1086 | 1086 | GCCCCACACGAGGCUGCGG | 4110 | CCGCAGCCUCGUGUGGGGC |
| siRNA 1087 | 1087 | CCCCACACGAGGCUGCGGC | 4111 | GCCGCAGCCUCGUGUGGGG |
| siRNA 1088 | 1088 | CCCACACGAGGCUGCGGCG | 4112 | CGCCGCAGCCUCGUGUGGG |
| siRNA 1089 | 1089 | CCACACGAGGCUGCGGCGU | 4113 | ACGCCGCAGCCUCGUGUGG |
| siRNA 1090 | 1090 | CACACGAGGCUGCGGCGUU | 4114 | AACGCCGCAGCCUCGUGUG |
| siRNA 1091 | 1091 | ACACGAGGCUGCGGCGUUC | 4115 | GAACGCCGCAGCCUCGUGU |
| siRNA 1092 | 1092 | CACGAGGCUGCGGCGUUCU | 4116 | AGAACGCCGCAGCCUCGUG |
| siRNA 1093 | 1093 | ACGAGGCUGCGGCGUUCUG | 4117 | CAGAACGCCGCAGCCUCGU |
| siRNA 1094 | 1094 | CGAGGCUGCGGCGUUCUGG | 4118 | CCAGAACGCCGCAGCCUCG |
| siRNA 1095 | 1095 | GAGGCUGCGGCGUUCUGGG | 4119 | CCCAGAACGCCGCAGCCUC |
| siRNA 1096 | 1096 | AGGCUGCGGCGUUCUGGGC | 4120 | GCCCAGAACGCCGCAGCCU |
| SIRNA 1097 | 1097 | GGCUGCGGCGUUCUGGGCG | 4121 | CGCCCAGAACGCCGCAGCC |
| siRNA 1098 | 1098 | GCUGCGGCGUUCUGGGCGC | 4122 | GCGCCCAGAACGCCGCAGC |
| siRNA 1099 | 1099 | CUGCGGCGUUCUGGGCGCU | 4123 | AGCGCCCAGAACGCCGCAG |
| siRNA 1100 | 1100 | UGCGGCGUUCUGGGCGCUG | 4124 | CAGCGCCCAGAACGCCGCA |
| siRNA 1101 | 1101 | GCGGCGUUCUGGGCGCUGU | 4125 | ACAGCGCCCAGAACGCCGC |
| siRNA 1102 | 1102 | CGGCGUUCUGGGCGCUGUG | 4126 | CACAGCGCCCAGAACGCCG |
| siRNA 1103 | 1103 | GGCGUUCUGGGCGCUGUGA | 4127 | UCACAGCGCCCAGAACGCC |
| siRNA 1104 | 1104 | GCGUUCUGGGCGCUGUGAC | 4128 | GUCACAGCGCCCAGAACGC |
| siRNA 1105 | 1105 | CGUUCUGGGCGCUGUGACC | 4129 | GGUCACAGCGCCCAGAACG |
| siRNA 1106 | 1106 | GUUCUGGGCGCUGUGACCU | 4130 | AGGUCACAGCGCCCAGAAC |
| siRNA 1107 | 1107 | UUCUGGGCGCUGUGACCUC | 4131 | GAGGUCACAGCGCCCAGAA |
| siRNA 1108 | 1108 | UCUGGGCGCUGUGACCUCU | 4132 | AGAGGUCACAGCGCCCAGA |
| siRNA 1109 | 1109 | CUGGGCGCUGUGACCUCUU | 4133 | AAGAGGUCACAGCGCCCAG |
| siRNA 1110 | 1110 | UGGGCGCUGUGACCUCUUC | 4134 | GAAGAGGUCACAGCGCCCA |
| siRNA 1111 | 1111 | GGGCGCUGUGACCUCUUCC | 4135 | GGAAGAGGUCACAGCGCCC |
| siRNA 1112 | 1112 | GGCGCUGUGACCUCUUCCA | 4136 | UGGAAGAGGUCACAGCGCC |
| siRNA 1113 | 1113 | GCGCUGUGACCUCUUCCAG | 4137 | CUGGAAGAGGUCACAGCGC |
| siRNA 1114 | 1114 | CGCUGUGACCUCUUCCAGA | 4138 | UCUGGAAGAGGUCACAGCG |
| siRNA 1115 | 1115 | GCUGUGACCUCUUCCAGAA | 4139 | UUCUGGAAGAGGUCACAGC |
| siRNA 1116 | 1116 | CUGUGACCUCUUCCAGAAG | 4140 | CUUCUGGAAGAGGUCACAG |
| siRNA 1117 | 1117 | UGUGACCUCUUCCAGAAGA | 4141 | UCUUCUGGAAGAGGUCACA |
| siRNA 1118 | 1118 | GUGACCUCUUCCAGAAGAA | 4142 | UUCUUCUGGAAGAGGUCAC |
| siRNA 1119 | 1119 | UGACCUCUUCCAGAAGAAA | 4143 | UUUCUUCUGGAAGAGGUCA |
| siRNA 1120 | 1120 | GACCUCUUCCAGAAGAAAG | 4144 | CUUUCUUCUGGAAGAGGUC |
| siRNA 1121 | 1121 | ACCUCUUCCAGAAGAAAGA | 4145 | UCUUUCUUCUGGAAGAGGU |
| siRNA 1122 | 1122 | CCUCUUCCAGAAGAAAGAC | 4146 | GUCUUUCUUCUGGAAGAGG |
| siRNA 1123 | 1123 | CUCUUCCAGAAGAAAGACU | 4147 | AGUCUUUCUUCUGGAAGAG |
| siRNA 1124 | 1124 | UCUUCCAGAAGAAAGACUA | 4148 | UAGUCUUUCUUCUGGAAGA |
| siRNA 1125 | 1125 | CUUCCAGAAGAAAGACUAC | 4149 | GUAGUCUUUCUUCUGGAAG |
| siRNA 1126 | 1126 | UUCCAGAAGAAAGACUACG | 4150 | CGUAGUCUUUCUUCUGGAA |
| siRNA 1127 | 1127 | UCCAGAAGAAAGACUACGU | 4151 | ACGUAGUCUUUCUUCUGGA |
| siRNA 1128 | 1128 | CCAGAAGAAAGACUACGUA | 4152 | UACGUAGUCUUUCUUCUGG |
| siRNA 1129 | 1129 | CAGAAGAAAGACUACGUAC | 4153 | GUACGUAGUCUUUCUUCUG |
| siRNA 1130 | 1130 | AGAAGAAAGACUACGUACG | 4154 | CGUACGUAGUCUUUCUUCU |
| siRNA 1131 | 1131 | GAAGAAAGACUACGUACGG | 4155 | CCGUACGUAGUCUUUCUUC |
| siRNA 1132 | 1132 | AAGAAAGACUACGUACGGA | 4156 | UCCGUACGUAGUCUUUCUU |
| siRNA 1133 | 1133 | AGAAAGACUACGUACGGAC | 4157 | GUCCGUACGUAGUCUUUCU |
| siRNA 1134 | 1134 | GAAAGACUACGUACGGACC | 4158 | GGUCCGUACGUAGUCUUUC |
| siRNA 1135 | 1135 | AAAGACUACGUACGGACCU | 4159 | AGGUCCGUACGUAGUCUUU |
| siRNA 1136 | 1136 | AAGACUACGUACGGACCUG | 4160 | CAGGUCCGUACGUAGUCUU |
| siRNA 1137 | 1137 | AGACUACGUACGGACCUGC | 4161 | GCAGGUCCGUACGUAGUCU |
| siRNA 1138 | 1138 | GACUACGUACGGACCUGCA | 4162 | UGCAGGUCCGUACGUAGUC |
| siRNA 1139 | 1139 | ACUACGUACGGACCUGCAU | 4163 | AUGCAGGUCCGUACGUAGU |
| siRNA 1140 | 1140 | CUACGUACGGACCUGCAUC | 4164 | GAUGCAGGUCCGUACGUAG |
| siRNA 1141 | 1141 | UACGUACGGACCUGCAUCA | 4165 | UGAUGCAGGUCCGUACGUA |
| siRNA 1142 | 1142 | ACGUACGGACCUGCAUCAU | 4166 | AUGAUGCAGGUCCGUACGU |
| siRNA 1143 | 1143 | CGUACGGACCUGCAUCAUG | 4167 | CAUGAUGCAGGUCCGUACG |
| siRNA 1144 | 1144 | GUACGGACCUGCAUCAUGA | 4168 | UCAUGAUGCAGGUCCGUAC |
| siRNA 1145 | 1145 | UACGGACCUGCAUCAUGAA | 4169 | UUCAUGAUGCAGGUCCGUA |
| siRNA 1146 | 1146 | ACGGACCUGCAUCAUGAAC | 4170 | GUUCAUGAUGCAGGUCCGU |
| siRNA 1147 | 1147 | CGGACCUGCAUCAUGAACA | 4171 | UGUUCAUGAUGCAGGUCCG |
| siRNA 1148 | 1148 | GGACCUGCAUCAUGAACAA | 4172 | UUGUUCAUGAUGCAGGUCC |
| siRNA 1149 | 1149 | GACCUGCAUCAUGAACAAU | 4173 | AUUGUUCAUGAUGCAGGUC |
| siRNA 1150 | 1150 | ACCUGCAUCAUGAACAAUG | 4174 | CAUUGUUCAUGAUGCAGGU |
| siRNA 1151 | 1151 | CCUGCAUCAUGAACAAUGG | 4175 | CCAUUGUUCAUGAUGCAGG |
| siRNA 1152 | 1152 | CUGCAUCAUGAACAAUGGG | 4176 | CCCAUUGUUCAUGAUGCAG |
| siRNA 1153 | 1153 | UGCAUCAUGAACAAUGGGG | 4177 | CCCCAUUGUUCAUGAUGCA |
| siRNA 1154 | 1154 | GCAUCAUGAACAAUGGGGU | 4178 | ACCCCAUUGUUCAUGAUGC |
| siRNA 1155 | 1155 | CAUCAUGAACAAUGGGGUU | 4179 | AACCCCAUUGUUCAUGAUG |
| siRNA 1156 | 1156 | AUCAUGAACAAUGGGGUUG | 4180 | CAACCCCAUUGUUCAUGAU |
| siRNA 1157 | 1157 | UCAUGAACAAUGGGGUUGG | 4181 | CCAACCCCAUUGUUCAUGA |
| siRNA 1158 | 1158 | CAUGAACAAUGGGGUUGGG | 4182 | CCCAACCCCAUUGUUCAUG |
| siRNA 1159 | 1159 | AUGAACAAUGGGGUUGGGU | 4183 | ACCCAACCCCAUUGUUCAU |
| siRNA 1160 | 1160 | UGAACAAUGGGGUUGGGUA | 4184 | UACCCAACCCCAUUGUUCA |
| siRNA 1161 | 1161 | GAACAAUGGGGUUGGGUAC | 4185 | GUACCCAACCCCAUUGUUC |
| siRNA 1162 | 1162 | AACAAUGGGGUUGGGUACC | 4186 | GGUACCCAACCCCAUUGUU |
| siRNA 1163 | 1163 | ACAAUGGGGUUGGGUACCG | 4187 | CGGUACCCAACCCCAUUGU |
| siRNA 1164 | 1164 | CAAUGGGGUUGGGUACCGG | 4188 | CCGGUACCCAACCCCAUUG |
| siRNA 1165 | 1165 | AAUGGGGUUGGGUACCGGG | 4189 | CCCGGUACCCAACCCCAUU |
| siRNA 1166 | 1166 | AUGGGGUUGGGUACCGGGG | 4190 | CCCCGGUACCCAACCCCAU |
| siRNA 1167 | 1167 | UGGGGUUGGGUACCGGGGC | 4191 | GCCCCGGUACCCAACCCCA |
| siRNA 1168 | 1168 | GGGGUUGGGUACCGGGGCA | 4192 | UGCCCCGGUACCCAACCCC |
| siRNA 1169 | 1169 | GGGUUGGGUACCGGGGCAC | 4193 | GUGCCCCGGUACCCAACCC |
| siRNA 1170 | 1170 | GGUUGGGUACCGGGGCACC | 4194 | GGUGCCCCGGUACCCAACC |
| siRNA 1171 | 1171 | GUUGGGUACCGGGGCACCA | 4195 | UGGUGCCCCGGUACCCAAC |
| siRNA 1172 | 1172 | UUGGGUACCGGGGCACCAU | 4196 | AUGGUGCCCCGGUACCCAA |
| siRNA 1173 | 1173 | UGGGUACCGGGGCACCAUG | 4197 | CAUGGUGCCCCGGUACCCA |
| siRNA 1174 | 1174 | GGGUACCGGGGCACCAUGG | 4198 | CCAUGGUGCCCCGGUACCC |
| siRNA 1175 | 1175 | GGUACCGGGGCACCAUGGC | 4199 | GCCAUGGUGCCCCGGUACC |
| siRNA 1176 | 1176 | GUACCGGGGCACCAUGGCC | 4200 | GGCCAUGGUGCCCCGGUAC |
| siRNA 1177 | 1177 | UACCGGGGCACCAUGGCCA | 4201 | UGGCCAUGGUGCCCCGGUA |
| siRNA 1178 | 1178 | ACCGGGGCACCAUGGCCAC | 4202 | GUGGCCAUGGUGCCCCGGU |
| siRNA 1179 | 1179 | CCGGGGCACCAUGGCCACG | 4203 | CGUGGCCAUGGUGCCCCGG |
| siRNA 1180 | 1180 | CGGGGCACCAUGGCCACGA | 4204 | UCGUGGCCAUGGUGCCCCG |
| siRNA 1181 | 1181 | GGGGCACCAUGGCCACGAC | 4205 | GUCGUGGCCAUGGUGCCCC |
| siRNA 1182 | 1182 | GGGCACCAUGGCCACGACC | 4206 | GGUCGUGGCCAUGGUGCCC |
| siRNA 1183 | 1183 | GGCACCAUGGCCACGACCG | 4207 | CGGUCGUGGCCAUGGUGCC |
| siRNA 1184 | 1184 | GCACCAUGGCCACGACCGU | 4208 | ACGGUCGUGGCCAUGGUGC |
| siRNA 1185 | 1185 | CACCAUGGCCACGACCGUG | 4209 | CACGGUCGUGGCCAUGGUG |
| siRNA 1186 | 1186 | ACCAUGGCCACGACCGUGG | 4210 | CCACGGUCGUGGCCAUGGU |
| siRNA 1187 | 1187 | CCAUGGCCACGACCGUGGG | 4211 | CCCACGGUCGUGGCCAUGG |
| siRNA 1188 | 1188 | CAUGGCCACGACCGUGGGU | 4212 | ACCCACGGUCGUGGCCAUG |
| siRNA 1189 | 1189 | AUGGCCACGACCGUGGGUG | 4213 | CACCCACGGUCGUGGCCAU |
| siRNA 1190 | 1190 | UGGCCACGACCGUGGGUGG | 4214 | CCACCCACGGUCGUGGCCA |
| siRNA 1191 | 1191 | GGCCACGACCGUGGGUGGC | 4215 | GCCACCCACGGUCGUGGCC |
| siRNA 1192 | 1192 | GCCACGACCGUGGGUGGCC | 4216 | GGCCACCCACGGUCGUGGC |
| siRNA 1193 | 1193 | CCACGACCGUGGGUGGCCU | 4217 | AGGCCACCCACGGUCGUGG |
| siRNA 1194 | 1194 | CACGACCGUGGGUGGCCUG | 4218 | CAGGCCACCCACGGUCGUG |
| siRNA 1195 | 1195 | ACGACCGUGGGUGGCCUGC | 4219 | GCAGGCCACCCACGGUCGU |
| siRNA 1196 | 1196 | CGACCGUGGGUGGCCUGCC | 4220 | GGCAGGCCACCCACGGUCG |
| siRNA 1197 | 1197 | GACCGUGGGUGGCCUGCCC | 4221 | GGGCAGGCCACCCACGGUC |
| siRNA 1198 | 1198 | ACCGUGGGUGGCCUGCCCU | 4222 | AGGGCAGGCCACCCACGGU |
| siRNA 1199 | 1199 | CCGUGGGUGGCCUGCCCUG | 4223 | CAGGGCAGGCCACCCACGG |
| siRNA 1200 | 1200 | CGUGGGUGGCCUGCCCUGC | 4224 | GCAGGGCAGGCCACCCACG |
| siRNA 1201 | 1201 | GUGGGUGGCCUGCCCUGCC | 4225 | GGCAGGGCAGGCCACCCAC |
| siRNA 1202 | 1202 | UGGGUGGCCUGCCCUGCCA | 4226 | UGGCAGGGCAGGCCACCCA |
| siRNA 1203 | 1203 | GGGUGGCCUGCCCUGCCAG | 4227 | CUGGCAGGGCAGGCCACCC |
| siRNA 1204 | 1204 | GGUGGCCUGCCCUGCCAGG | 4228 | CCUGGCAGGGCAGGCCACC |
| siRNA 1205 | 1205 | GUGGCCUGCCCUGCCAGGC | 4229 | GCCUGGCAGGGCAGGCCAC |
| siRNA 1206 | 1206 | UGGCCUGCCCUGCCAGGCU | 4230 | AGCCUGGCAGGGCAGGCCA |
| siRNA 1207 | 1207 | GGCCUGCCCUGCCAGGCUU | 4231 | AAGCCUGGCAGGGCAGGCC |
| siRNA 1208 | 1208 | GCCUGCCCUGCCAGGCUUG | 4232 | CAAGCCUGGCAGGGCAGGC |
| siRNA 1209 | 1209 | CCUGCCCUGCCAGGCUUGG | 4233 | CCAAGCCUGGCAGGGCAGG |
| siRNA 1210 | 1210 | CUGCCCUGCCAGGCUUGGA | 4234 | UCCAAGCCUGGCAGGGCAG |
| siRNA 1211 | 1211 | UGCCCUGCCAGGCUUGGAG | 4235 | CUCCAAGCCUGGCAGGGCA |
| siRNA 1212 | 1212 | GCCCUGCCAGGCUUGGAGC | 4236 | GCUCCAAGCCUGGCAGGGC |
| siRNA 1213 | 1213 | CCCUGCCAGGCUUGGAGCC | 4237 | GGCUCCAAGCCUGGCAGGG |
| siRNA 1214 | 1214 | CCUGCCAGGCUUGGAGCCA | 4238 | UGGCUCCAAGCCUGGCAGG |
| siRNA 1215 | 1215 | CUGCCAGGCUUGGAGCCAC | 4239 | GUGGCUCCAAGCCUGGCAG |
| siRNA 1216 | 1216 | UGCCAGGCUUGGAGCCACA | 4240 | UGUGGCUCCAAGCCUGGCA |
| siRNA 1217 | 1217 | GCCAGGCUUGGAGCCACAA | 4241 | UUGUGGCUCCAAGCCUGGC |
| siRNA 1218 | 1218 | CCAGGCUUGGAGCCACAAG | 4242 | CUUGUGGCUCCAAGCCUGG |
| siRNA 1219 | 1219 | CAGGCUUGGAGCCACAAGU | 4243 | ACUUGUGGCUCCAAGCCUG |
| siRNA 1220 | 1220 | AGGCUUGGAGCCACAAGUU | 4244 | AACUUGUGGCUCCAAGCCU |
| siRNA 1221 | 1221 | GGCUUGGAGCCACAAGUUC | 4245 | GAACUUGUGGCUCCAAGCC |
| siRNA 1222 | 1222 | GCUUGGAGCCACAAGUUCC | 4246 | GGAACUUGUGGCUCCAAGC |
| siRNA 1223 | 1223 | CUUGGAGCCACAAGUUCCC | 4247 | GGGAACUUGUGGCUCCAAG |
| siRNA 1224 | 1224 | UUGGAGCCACAAGUUCCCA | 4248 | UGGGAACUUGUGGCUCCAA |
| siRNA 1225 | 1225 | UGGAGCCACAAGUUCCCAA | 4249 | UUGGGAACUUGUGGCUCCA |
| siRNA 1226 | 1226 | GGAGCCACAAGUUCCCAAA | 4250 | UUUGGGAACUUGUGGCUCC |
| siRNA 1227 | 1227 | GAGCCACAAGUUCCCAAAU | 4251 | AUUUGGGAACUUGUGGCUC |
| siRNA 1228 | 1228 | AGCCACAAGUUCCCAAAUG | 4252 | CAUUUGGGAACUUGUGGCU |
| siRNA 1229 | 1229 | GCCACAAGUUCCCAAAUGA | 4253 | UCAUUUGGGAACUUGUGGC |
| siRNA 1230 | 1230 | CCACAAGUUCCCAAAUGAU | 4254 | AUCAUUUGGGAACUUGUGG |
| siRNA 1231 | 1231 | CACAAGUUCCCAAAUGAUC | 4255 | GAUCAUUUGGGAACUUGUG |
| SIRNA 1232 | 1232 | ACAAGUUCCCAAAUGAUCA | 4256 | UGAUCAUUUGGGAACUUGU |
| siRNA 1233 | 1233 | CAAGUUCCCAAAUGAUCAC | 4257 | GUGAUCAUUUGGGAACUUG |
| siRNA 1234 | 1234 | AAGUUCCCAAAUGAUCACA | 4258 | UGUGAUCAUUUGGGAACUU |
| siRNA 1235 | 1235 | AGUUCCCAAAUGAUCACAA | 4259 | UUGUGAUCAUUUGGGAACU |
| siRNA 1236 | 1236 | GUUCCCAAAUGAUCACAAG | 4260 | CUUGUGAUCAUUUGGGAAC |
| siRNA 1237 | 1237 | UUCCCAAAUGAUCACAAGU | 4261 | ACUUGUGAUCAUUUGGGAA |
| siRNA 1238 | 1238 | UCCCAAAUGAUCACAAGUA | 4262 | UACUUGUGAUCAUUUGGGA |
| siRNA 1239 | 1239 | CCCAAAUGAUCACAAGUAC | 4263 | GUACUUGUGAUCAUUUGGG |
| siRNA 1240 | 1240 | CCAAAUGAUCACAAGUACA | 4264 | UGUACUUGUGAUCAUUUGG |
| siRNA 1241 | 1241 | CAAAUGAUCACAAGUACAC | 4265 | GUGUACUUGUGAUCAUUUG |
| siRNA 1242 | 1242 | AAAUGAUCACAAGUACACG | 4266 | CGUGUACUUGUGAUCAUUU |
| siRNA 1243 | 1243 | AAUGAUCACAAGUACACGC | 4267 | GCGUGUACUUGUGAUCAUU |
| siRNA 1244 | 1244 | AUGAUCACAAGUACACGCC | 4268 | GGCGUGUACUUGUGAUCAU |
| siRNA 1245 | 1245 | UGAUCACAAGUACACGCCC | 4269 | GGGCGUGUACUUGUGAUCA |
| siRNA 1246 | 1246 | GAUCACAAGUACACGCCCA | 4270 | UGGGCGUGUACUUGUGAUC |
| siRNA 1247 | 1247 | AUCACAAGUACACGCCCAC | 4271 | GUGGGCGUGUACUUGUGAU |
| siRNA 1248 | 1248 | UCACAAGUACACGCCCACU | 4272 | AGUGGGCGUGUACUUGUGA |
| siRNA 1249 | 1249 | CACAAGUACACGCCCACUC | 4273 | GAGUGGGCGUGUACUUGUG |
| siRNA 1250 | 1250 | ACAAGUACACGCCCACUCU | 4274 | AGAGUGGGCGUGUACUUGU |
| siRNA 1251 | 1251 | CAAGUACACGCCCACUCUC | 4275 | GAGAGUGGGCGUGUACUUG |
| siRNA 1252 | 1252 | AAGUACACGCCCACUCUCC | 4276 | GGAGAGUGGGCGUGUACUU |
| siRNA 1253 | 1253 | AGUACACGCCCACUCUCCG | 4277 | CGGAGAGUGGGCGUGUACU |
| siRNA 1254 | 1254 | GUACACGCCCACUCUCCGG | 4278 | CCGGAGAGUGGGCGUGUAC |
| siRNA 1255 | 1255 | UACACGCCCACUCUCCGGA | 4279 | UCCGGAGAGUGGGCGUGUA |
| siRNA 1256 | 1256 | ACACGCCCACUCUCCGGAA | 4280 | UUCCGGAGAGUGGGCGUGU |
| siRNA 1257 | 1257 | CACGCCCACUCUCCGGAAU | 4281 | AUUCCGGAGAGUGGGCGUG |
| siRNA 1258 | 1258 | ACGCCCACUCUCCGGAAUG | 4282 | CAUUCCGGAGAGUGGGCGU |
| siRNA 1259 | 1259 | CGCCCACUCUCCGGAAUGG | 4283 | CCAUUCCGGAGAGUGGGCG |
| siRNA 1260 | 1260 | GCCCACUCUCCGGAAUGGC | 4284 | GCCAUUCCGGAGAGUGGGC |
| siRNA 1261 | 1261 | CCCACUCUCCGGAAUGGCC | 4285 | GGCCAUUCCGGAGAGUGGG |
| siRNA 1262 | 1262 | CCACUCUCCGGAAUGGCCU | 4286 | AGGCCAUUCCGGAGAGUGG |
| siRNA 1263 | 1263 | CACUCUCCGGAAUGGCCUG | 4287 | CAGGCCAUUCCGGAGAGUG |
| siRNA 1264 | 1264 | ACUCUCCGGAAUGGCCUGG | 4288 | CCAGGCCAUUCCGGAGAGU |
| siRNA 1265 | 1265 | CUCUCCGGAAUGGCCUGGA | 4289 | UCCAGGCCAUUCCGGAGAG |
| siRNA 1266 | 1266 | UCUCCGGAAUGGCCUGGAA | 4290 | UUCCAGGCCAUUCCGGAGA |
| siRNA 1267 | 1267 | CUCCGGAAUGGCCUGGAAG | 4291 | CUUCCAGGCCAUUCCGGAG |
| siRNA 1268 | 1268 | UCCGGAAUGGCCUGGAAGA | 4292 | UCUUCCAGGCCAUUCCGGA |
| siRNA 1269 | 1269 | CCGGAAUGGCCUGGAAGAG | 4293 | CUCUUCCAGGCCAUUCCGG |
| siRNA 1270 | 1270 | CGGAAUGGCCUGGAAGAGA | 4294 | UCUCUUCCAGGCCAUUCCG |
| siRNA 1271 | 1271 | GGAAUGGCCUGGAAGAGAA | 4295 | UUCUCUUCCAGGCCAUUCC |
| siRNA 1272 | 1272 | GAAUGGCCUGGAAGAGAAC | 4296 | GUUCUCUUCCAGGCCAUUC |
| siRNA 1273 | 1273 | AAUGGCCUGGAAGAGAACU | 4297 | AGUUCUCUUCCAGGCCAUU |
| siRNA 1274 | 1274 | AUGGCCUGGAAGAGAACUU | 4298 | AAGUUCUCUUCCAGGCCAU |
| siRNA 1275 | 1275 | UGGCCUGGAAGAGAACUUC | 4299 | GAAGUUCUCUUCCAGGCCA |
| siRNA 1276 | 1276 | GGCCUGGAAGAGAACUUCU | 4300 | AGAAGUUCUCUUCCAGGCC |
| siRNA 1277 | 1277 | GCCUGGAAGAGAACUUCUG | 4301 | CAGAAGUUCUCUUCCAGGC |
| siRNA 1278 | 1278 | CCUGGAAGAGAACUUCUGC | 4302 | GCAGAAGUUCUCUUCCAGG |
| siRNA 1279 | 1279 | CUGGAAGAGAACUUCUGCC | 4303 | GGCAGAAGUUCUCUUCCAG |
| siRNA 1280 | 1280 | UGGAAGAGAACUUCUGCCG | 4304 | CGGCAGAAGUUCUCUUCCA |
| siRNA 1281 | 1281 | GGAAGAGAACUUCUGCCGU | 4305 | ACGGCAGAAGUUCUCUUCC |
| siRNA 1282 | 1282 | GAAGAGAACUUCUGCCGUA | 4306 | UACGGCAGAAGUUCUCUUC |
| siRNA 1283 | 1283 | AAGAGAACUUCUGCCGUAA | 4307 | UUACGGCAGAAGUUCUCUU |
| siRNA 1284 | 1284 | AGAGAACUUCUGCCGUAAC | 4308 | GUUACGGCAGAAGUUCUCU |
| siRNA 1285 | 1285 | GAGAACUUCUGCCGUAACC | 4309 | GGUUACGGCAGAAGUUCUC |
| siRNA 1286 | 1286 | AGAACUUCUGCCGUAACCC | 4310 | GGGUUACGGCAGAAGUUCU |
| siRNA 1287 | 1287 | GAACUUCUGCCGUAACCCU | 4311 | AGGGUUACGGCAGAAGUUC |
| siRNA 1288 | 1288 | AACUUCUGCCGUAACCCUG | 4312 | CAGGGUUACGGCAGAAGUU |
| siRNA 1289 | 1289 | ACUUCUGCCGUAACCCUGA | 4313 | UCAGGGUUACGGCAGAAGU |
| siRNA 1290 | 1290 | CUUCUGCCGUAACCCUGAU | 4314 | AUCAGGGUUACGGCAGAAG |
| siRNA 1291 | 1291 | UUCUGCCGUAACCCUGAUG | 4315 | CAUCAGGGUUACGGCAGAA |
| siRNA 1292 | 1292 | UCUGCCGUAACCCUGAUGG | 4316 | CCAUCAGGGUUACGGCAGA |
| siRNA 1293 | 1293 | CUGCCGUAACCCUGAUGGC | 4317 | GCCAUCAGGGUUACGGCAG |
| siRNA 1294 | 1294 | UGCCGUAACCCUGAUGGCG | 4318 | CGCCAUCAGGGUUACGGCA |
| siRNA 1295 | 1295 | GCCGUAACCCUGAUGGCGA | 4319 | UCGCCAUCAGGGUUACGGC |
| siRNA 1296 | 1296 | CCGUAACCCUGAUGGCGAC | 4320 | GUCGCCAUCAGGGUUACGG |
| siRNA 1297 | 1297 | CGUAACCCUGAUGGCGACC | 4321 | GGUCGCCAUCAGGGUUACG |
| siRNA 1298 | 1298 | GUAACCCUGAUGGCGACCC | 4322 | GGGUCGCCAUCAGGGUUAC |
| siRNA 1299 | 1299 | UAACCCUGAUGGCGACCCC | 4323 | GGGGUCGCCAUCAGGGUUA |
| siRNA 1300 | 1300 | AACCCUGAUGGCGACCCCG | 4324 | CGGGGUCGCCAUCAGGGUU |
| siRNA 1301 | 1301 | ACCCUGAUGGCGACCCCGG | 4325 | CCGGGGUCGCCAUCAGGGU |
| siRNA 1302 | 1302 | CCCUGAUGGCGACCCCGGA | 4326 | UCCGGGGUCGCCAUCAGGG |
| siRNA 1303 | 1303 | CCUGAUGGCGACCCCGGAG | 4327 | CUCCGGGGUCGCCAUCAGG |
| siRNA 1304 | 1304 | CUGAUGGCGACCCCGGAGG | 4328 | CCUCCGGGGUCGCCAUCAG |
| siRNA 1305 | 1305 | UGAUGGCGACCCCGGAGGU | 4329 | ACCUCCGGGGUCGCCAUCA |
| siRNA 1306 | 1306 | GAUGGCGACCCCGGAGGUC | 4330 | GACCUCCGGGGUCGCCAUC |
| siRNA 1307 | 1307 | AUGGCGACCCCGGAGGUCC | 4331 | GGACCUCCGGGGUCGCCAU |
| siRNA 1308 | 1308 | UGGCGACCCCGGAGGUCCU | 4332 | AGGACCUCCGGGGUCGCCA |
| siRNA 1309 | 1309 | GGCGACCCCGGAGGUCCUU | 4333 | AAGGACCUCCGGGGUCGCC |
| siRNA 1310 | 1310 | GCGACCCCGGAGGUCCUUG | 4334 | CAAGGACCUCCGGGGUCGC |
| siRNA 1311 | 1311 | CGACCCCGGAGGUCCUUGG | 4335 | CCAAGGACCUCCGGGGUCG |
| siRNA 1312 | 1312 | GACCCCGGAGGUCCUUGGU | 4336 | ACCAAGGACCUCCGGGGUC |
| siRNA 1313 | 1313 | ACCCCGGAGGUCCUUGGUG | 4337 | CACCAAGGACCUCCGGGGU |
| siRNA 1314 | 1314 | CCCCGGAGGUCCUUGGUGC | 4338 | GCACCAAGGACCUCCGGGG |
| siRNA 1315 | 1315 | CCCGGAGGUCCUUGGUGCU | 4339 | AGCACCAAGGACCUCCGGG |
| siRNA 1316 | 1316 | CCGGAGGUCCUUGGUGCUA | 4340 | UAGCACCAAGGACCUCCGG |
| siRNA 1317 | 1317 | CGGAGGUCCUUGGUGCUAC | 4341 | GUAGCACCAAGGACCUCCG |
| siRNA 1318 | 1318 | GGAGGUCCUUGGUGCUACA | 4342 | UGUAGCACCAAGGACCUCC |
| siRNA 1319 | 1319 | GAGGUCCUUGGUGCUACAC | 4343 | GUGUAGCACCAAGGACCUC |
| siRNA 1320 | 1320 | AGGUCCUUGGUGCUACACA | 4344 | UGUGUAGCACCAAGGACCU |
| siRNA 1321 | 1321 | GGUCCUUGGUGCUACACAA | 4345 | UUGUGUAGCACCAAGGACC |
| siRNA 1322 | 1322 | GUCCUUGGUGCUACACAAC | 4346 | GUUGUGUAGCACCAAGGAC |
| siRNA 1323 | 1323 | UCCUUGGUGCUACACAACA | 4347 | UGUUGUGUAGCACCAAGGA |
| siRNA 1324 | 1324 | CCUUGGUGCUACACAACAG | 4348 | CUGUUGUGUAGCACCAAGG |
| siRNA 1325 | 1325 | CUUGGUGCUACACAACAGA | 4349 | UCUGUUGUGUAGCACCAAG |
| siRNA 1326 | 1326 | UUGGUGCUACACAACAGAC | 4350 | GUCUGUUGUGUAGCACCAA |
| siRNA 1327 | 1327 | UGGUGCUACACAACAGACC | 4351 | GGUCUGUUGUGUAGCACCA |
| siRNA 1328 | 1328 | GGUGCUACACAACAGACCC | 4352 | GGGUCUGUUGUGUAGCACC |
| siRNA 1329 | 1329 | GUGCUACACAACAGACCCU | 4353 | AGGGUCUGUUGUGUAGCAC |
| siRNA 1330 | 1330 | UGCUACACAACAGACCCUG | 4354 | CAGGGUCUGUUGUGUAGCA |
| siRNA 1331 | 1331 | GCUACACAACAGACCCUGC | 4355 | GCAGGGUCUGUUGUGUAGC |
| siRNA 1332 | 1332 | CUACACAACAGACCCUGCU | 4356 | AGCAGGGUCUGUUGUGUAG |
| siRNA 1333 | 1333 | UACACAACAGACCCUGCUG | 4357 | CAGCAGGGUCUGUUGUGUA |
| siRNA 1334 | 1334 | ACACAACAGACCCUGCUGU | 4358 | ACAGCAGGGUCUGUUGUGU |
| siRNA 1335 | 1335 | CACAACAGACCCUGCUGUG | 4359 | CACAGCAGGGUCUGUUGUG |
| siRNA 1336 | 1336 | ACAACAGACCCUGCUGUGC | 4360 | GCACAGCAGGGUCUGUUGU |
| siRNA 1337 | 1337 | CAACAGACCCUGCUGUGCG | 4361 | CGCACAGCAGGGUCUGUUG |
| siRNA 1338 | 1338 | AACAGACCCUGCUGUGCGC | 4362 | GCGCACAGCAGGGUCUGUU |
| siRNA 1339 | 1339 | ACAGACCCUGCUGUGCGCU | 4363 | AGCGCACAGCAGGGUCUGU |
| siRNA 1340 | 1340 | CAGACCCUGCUGUGCGCUU | 4364 | AAGCGCACAGCAGGGUCUG |
| siRNA 1341 | 1341 | AGACCCUGCUGUGCGCUUC | 4365 | GAAGCGCACAGCAGGGUCU |
| siRNA 1342 | 1342 | GACCCUGCUGUGCGCUUCC | 4366 | GGAAGCGCACAGCAGGGUC |
| siRNA 1343 | 1343 | ACCCUGCUGUGCGCUUCCA | 4367 | UGGAAGCGCACAGCAGGGU |
| siRNA 1344 | 1344 | CCCUGCUGUGCGCUUCCAG | 4368 | CUGGAAGCGCACAGCAGGG |
| siRNA 1345 | 1345 | CCUGCUGUGCGCUUCCAGA | 4369 | UCUGGAAGCGCACAGCAGG |
| siRNA 1346 | 1346 | CUGCUGUGCGCUUCCAGAG | 4370 | CUCUGGAAGCGCACAGCAG |
| siRNA 1347 | 1347 | UGCUGUGCGCUUCCAGAGC | 4371 | GCUCUGGAAGCGCACAGCA |
| siRNA 1348 | 1348 | GCUGUGCGCUUCCAGAGCU | 4372 | AGCUCUGGAAGCGCACAGC |
| siRNA 1349 | 1349 | CUGUGCGCUUCCAGAGCUG | 4373 | CAGCUCUGGAAGCGCACAG |
| siRNA 1350 | 1350 | UGUGCGCUUCCAGAGCUGC | 4374 | GCAGCUCUGGAAGCGCACA |
| siRNA 1351 | 1351 | GUGCGCUUCCAGAGCUGCG | 4375 | CGCAGCUCUGGAAGCGCAC |
| siRNA 1352 | 1352 | UGCGCUUCCAGAGCUGCGG | 4376 | CCGCAGCUCUGGAAGCGCA |
| siRNA 1353 | 1353 | GCGCUUCCAGAGCUGCGGC | 4377 | GCCGCAGCUCUGGAAGCGC |
| siRNA 1354 | 1354 | CGCUUCCAGAGCUGCGGCA | 4378 | UGCCGCAGCUCUGGAAGCG |
| siRNA 1355 | 1355 | GCUUCCAGAGCUGCGGCAU | 4379 | AUGCCGCAGCUCUGGAAGC |
| siRNA 1356 | 1356 | CUUCCAGAGCUGCGGCAUC | 4380 | GAUGCCGCAGCUCUGGAAG |
| siRNA 1357 | 1357 | UUCCAGAGCUGCGGCAUCA | 4381 | UGAUGCCGCAGCUCUGGAA |
| siRNA 1358 | 1358 | UCCAGAGCUGCGGCAUCAA | 4382 | UUGAUGCCGCAGCUCUGGA |
| siRNA 1359 | 1359 | CCAGAGCUGCGGCAUCAAA | 4383 | UUUGAUGCCGCAGCUCUGG |
| siRNA 1360 | 1360 | CAGAGCUGCGGCAUCAAAU | 4384 | AUUUGAUGCCGCAGCUCUG |
| siRNA 1361 | 1361 | AGAGCUGCGGCAUCAAAUC | 4385 | GAUUUGAUGCCGCAGCUCU |
| siRNA 1362 | 1362 | GAGCUGCGGCAUCAAAUCC | 4386 | GGAUUUGAUGCCGCAGCUC |
| siRNA 1363 | 1363 | AGCUGCGGCAUCAAAUCCU | 4387 | AGGAUUUGAUGCCGCAGCU |
| siRNA 1364 | 1364 | GCUGCGGCAUCAAAUCCUG | 4388 | CAGGAUUUGAUGCCGCAGC |
| siRNA 1365 | 1365 | CUGCGGCAUCAAAUCCUGC | 4389 | GCAGGAUUUGAUGCCGCAG |
| siRNA 1366 | 1366 | UGCGGCAUCAAAUCCUGCC | 4390 | GGCAGGAUUUGAUGCCGCA |
| siRNA 1367 | 1367 | GCGGCAUCAAAUCCUGCCG | 4391 | CGGCAGGAUUUGAUGCCGC |
| siRNA 1368 | 1368 | CGGCAUCAAAUCCUGCCGG | 4392 | CCGGCAGGAUUUGAUGCCG |
| siRNA 1369 | 1369 | GGCAUCAAAUCCUGCCGGG | 4393 | CCCGGCAGGAUUUGAUGCC |
| siRNA 1370 | 1370 | GCAUCAAAUCCUGCCGGGA | 4394 | UCCCGGCAGGAUUUGAUGC |
| siRNA 1371 | 1371 | CAUCAAAUCCUGCCGGGAG | 4395 | CUCCCGGCAGGAUUUGAUG |
| siRNA 1372 | 1372 | AUCAAAUCCUGCCGGGAGG | 4396 | CCUCCCGGCAGGAUUUGAU |
| siRNA 1373 | 1373 | UCAAAUCCUGCCGGGAGGC | 4397 | GCCUCCCGGCAGGAUUUGA |
| siRNA 1374 | 1374 | CAAAUCCUGCCGGGAGGCC | 4398 | GGCCUCCCGGCAGGAUUUG |
| siRNA 1375 | 1375 | AAAUCCUGCCGGGAGGCCG | 4399 | CGGCCUCCCGGCAGGAUUU |
| siRNA 1376 | 1376 | AAUCCUGCCGGGAGGCCGC | 4400 | GCGGCCUCCCGGCAGGAUU |
| siRNA 1377 | 1377 | AUCCUGCCGGGAGGCCGCG | 4401 | CGCGGCCUCCCGGCAGGAU |
| SIRNA 1378 | 1378 | UCCUGCCGGGAGGCCGCGU | 4402 | ACGCGGCCUCCCGGCAGGA |
| siRNA 1379 | 1379 | CCUGCCGGGAGGCCGCGUG | 4403 | CACGCGGCCUCCCGGCAGG |
| siRNA 1380 | 1380 | CUGCCGGGAGGCCGCGUGU | 4404 | ACACGCGGCCUCCCGGCAG |
| siRNA 1381 | 1381 | UGCCGGGAGGCCGCGUGUG | 4405 | CACACGCGGCCUCCCGGCA |
| siRNA 1382 | 1382 | GCCGGGAGGCCGCGUGUGU | 4406 | ACACACGCGGCCUCCCGGC |
| siRNA 1383 | 1383 | CCGGGAGGCCGCGUGUGUC | 4407 | GACACACGCGGCCUCCCGG |
| siRNA 1384 | 1384 | CGGGAGGCCGCGUGUGUCU | 4408 | AGACACACGCGGCCUCCCG |
| siRNA 1385 | 1385 | GGGAGGCCGCGUGUGUCUG | 4409 | CAGACACACGCGGCCUCCC |
| siRNA 1386 | 1386 | GGAGGCCGCGUGUGUCUGG | 4410 | CCAGACACACGCGGCCUCC |
| siRNA 1387 | 1387 | GAGGCCGCGUGUGUCUGGU | 4411 | ACCAGACACACGCGGCCUC |
| siRNA 1388 | 1388 | AGGCCGCGUGUGUCUGGUG | 4412 | CACCAGACACACGCGGCCU |
| siRNA 1389 | 1389 | GGCCGCGUGUGUCUGGUGC | 4413 | GCACCAGACACACGCGGCC |
| siRNA 1390 | 1390 | GCCGCGUGUGUCUGGUGCA | 4414 | UGCACCAGACACACGCGGC |
| siRNA 1391 | 1391 | CCGCGUGUGUCUGGUGCAA | 4415 | UUGCACCAGACACACGCGG |
| siRNA 1392 | 1392 | CGCGUGUGUCUGGUGCAAU | 4416 | AUUGCACCAGACACACGCG |
| siRNA 1393 | 1393 | GCGUGUGUCUGGUGCAAUG | 4417 | CAUUGCACCAGACACACGC |
| siRNA 1394 | 1394 | CGUGUGUCUGGUGCAAUGG | 4418 | CCAUUGCACCAGACACACG |
| siRNA 1395 | 1395 | GUGUGUCUGGUGCAAUGGC | 4419 | GCCAUUGCACCAGACACAC |
| siRNA 1396 | 1396 | UGUGUCUGGUGCAAUGGCG | 4420 | CGCCAUUGCACCAGACACA |
| siRNA 1397 | 1397 | GUGUCUGGUGCAAUGGCGA | 4421 | UCGCCAUUGCACCAGACAC |
| siRNA 1398 | 1398 | UGUCUGGUGCAAUGGCGAG | 4422 | CUCGCCAUUGCACCAGACA |
| siRNA 1399 | 1399 | GUCUGGUGCAAUGGCGAGG | 4423 | CCUCGCCAUUGCACCAGAC |
| siRNA 1400 | 1400 | UCUGGUGCAAUGGCGAGGA | 4424 | UCCUCGCCAUUGCACCAGA |
| siRNA 1401 | 1401 | CUGGUGCAAUGGCGAGGAA | 4425 | UUCCUCGCCAUUGCACCAG |
| siRNA 1402 | 1402 | UGGUGCAAUGGCGAGGAAU | 4426 | AUUCCUCGCCAUUGCACCA |
| siRNA 1403 | 1403 | GGUGCAAUGGCGAGGAAUA | 4427 | UAUUCCUCGCCAUUGCACC |
| siRNA 1404 | 1404 | GUGCAAUGGCGAGGAAUAC | 4428 | GUAUUCCUCGCCAUUGCAC |
| siRNA 1405 | 1405 | UGCAAUGGCGAGGAAUACC | 4429 | GGUAUUCCUCGCCAUUGCA |
| siRNA 1406 | 1406 | GCAAUGGCGAGGAAUACCG | 4430 | CGGUAUUCCUCGCCAUUGC |
| siRNA 1407 | 1407 | CAAUGGCGAGGAAUACCGC | 4431 | GCGGUAUUCCUCGCCAUUG |
| siRNA 1408 | 1408 | AAUGGCGAGGAAUACCGCG | 4432 | CGCGGUAUUCCUCGCCAUU |
| siRNA 1409 | 1409 | AUGGCGAGGAAUACCGCGG | 4433 | CCGCGGUAUUCCUCGCCAU |
| siRNA 1410 | 1410 | UGGCGAGGAAUACCGCGGC | 4434 | GCCGCGGUAUUCCUCGCCA |
| siRNA 1411 | 1411 | GGCGAGGAAUACCGCGGCG | 4435 | CGCCGCGGUAUUCCUCGCC |
| siRNA 1412 | 1412 | GCGAGGAAUACCGCGGCGC | 4436 | GCGCCGCGGUAUUCCUCGC |
| siRNA 1413 | 1413 | CGAGGAAUACCGCGGCGCG | 4437 | CGCGCCGCGGUAUUCCUCG |
| siRNA 1414 | 1414 | GAGGAAUACCGCGGCGCGG | 4438 | CCGCGCCGCGGUAUUCCUC |
| siRNA 1415 | 1415 | AGGAAUACCGCGGCGCGGU | 4439 | ACCGCGCCGCGGUAUUCCU |
| siRNA 1416 | 1416 | GGAAUACCGCGGCGCGGUA | 4440 | UACCGCGCCGCGGUAUUCC |
| siRNA 1417 | 1417 | GAAUACCGCGGCGCGGUAG | 4441 | CUACCGCGCCGCGGUAUUC |
| siRNA 1418 | 1418 | AAUACCGCGGCGCGGUAGA | 4442 | UCUACCGCGCCGCGGUAUU |
| siRNA 1419 | 1419 | AUACCGCGGCGCGGUAGAC | 4443 | GUCUACCGCGCCGCGGUAU |
| siRNA 1420 | 1420 | UACCGCGGCGCGGUAGACC | 4444 | GGUCUACCGCGCCGCGGUA |
| siRNA 1421 | 1421 | ACCGCGGCGCGGUAGACCG | 4445 | CGGUCUACCGCGCCGCGGU |
| siRNA 1422 | 1422 | CCGCGGCGCGGUAGACCGC | 4446 | GCGGUCUACCGCGCCGCGG |
| siRNA 1423 | 1423 | CGCGGCGCGGUAGACCGCA | 4447 | UGCGGUCUACCGCGCCGCG |
| siRNA 1424 | 1424 | GCGGCGCGGUAGACCGCAC | 4448 | GUGCGGUCUACCGCGCCGC |
| siRNA 1425 | 1425 | CGGCGCGGUAGACCGCACG | 4449 | CGUGCGGUCUACCGCGCCG |
| siRNA 1426 | 1426 | GGCGCGGUAGACCGCACGG | 4450 | CCGUGCGGUCUACCGCGCC |
| siRNA 1427 | 1427 | GCGCGGUAGACCGCACGGA | 4451 | UCCGUGCGGUCUACCGCGC |
| siRNA 1428 | 1428 | CGCGGUAGACCGCACGGAG | 4452 | CUCCGUGCGGUCUACCGCG |
| siRNA 1429 | 1429 | GCGGUAGACCGCACGGAGU | 4453 | ACUCCGUGCGGUCUACCGC |
| siRNA 1430 | 1430 | CGGUAGACCGCACGGAGUC | 4454 | GACUCCGUGCGGUCUACCG |
| siRNA 1431 | 1431 | GGUAGACCGCACGGAGUCA | 4455 | UGACUCCGUGCGGUCUACC |
| siRNA 1432 | 1432 | GUAGACCGCACGGAGUCAG | 4456 | CUGACUCCGUGCGGUCUAC |
| siRNA 1433 | 1433 | UAGACCGCACGGAGUCAGG | 4457 | CCUGACUCCGUGCGGUCUA |
| siRNA 1434 | 1434 | AGACCGCACGGAGUCAGGG | 4458 | CCCUGACUCCGUGCGGUCU |
| siRNA 1435 | 1435 | GACCGCACGGAGUCAGGGC | 4459 | GCCCUGACUCCGUGCGGUC |
| siRNA 1436 | 1436 | ACCGCACGGAGUCAGGGCG | 4460 | CGCCCUGACUCCGUGCGGU |
| siRNA 1437 | 1437 | CCGCACGGAGUCAGGGCGC | 4461 | GCGCCCUGACUCCGUGCGG |
| siRNA 1438 | 1438 | CGCACGGAGUCAGGGCGCG | 4462 | CGCGCCCUGACUCCGUGCG |
| siRNA 1439 | 1439 | GCACGGAGUCAGGGCGCGA | 4463 | UCGCGCCCUGACUCCGUGC |
| siRNA 1440 | 1440 | CACGGAGUCAGGGCGCGAG | 4464 | CUCGCGCCCUGACUCCGUG |
| siRNA 1441 | 1441 | ACGGAGUCAGGGCGCGAGU | 4465 | ACUCGCGCCCUGACUCCGU |
| siRNA 1442 | 1442 | CGGAGUCAGGGCGCGAGUG | 4466 | CACUCGCGCCCUGACUCCG |
| siRNA 1443 | 1443 | GGAGUCAGGGCGCGAGUGC | 4467 | GCACUCGCGCCCUGACUCC |
| siRNA 1444 | 1444 | GAGUCAGGGCGCGAGUGCC | 4468 | GGCACUCGCGCCCUGACUC |
| siRNA 1445 | 1445 | AGUCAGGGCGCGAGUGCCA | 4469 | UGGCACUCGCGCCCUGACU |
| siRNA 1446 | 1446 | GUCAGGGCGCGAGUGCCAG | 4470 | CUGGCACUCGCGCCCUGAC |
| siRNA 1447 | 1447 | UCAGGGCGCGAGUGCCAGC | 4471 | GCUGGCACUCGCGCCCUGA |
| siRNA 1448 | 1448 | CAGGGCGCGAGUGCCAGCG | 4472 | CGCUGGCACUCGCGCCCUG |
| siRNA 1449 | 1449 | AGGGCGCGAGUGCCAGCGC | 4473 | GCGCUGGCACUCGCGCCCU |
| siRNA 1450 | 1450 | GGGCGCGAGUGCCAGCGCU | 4474 | AGCGCUGGCACUCGCGCCC |
| siRNA 1451 | 1451 | GGCGCGAGUGCCAGCGCUG | 4475 | CAGCGCUGGCACUCGCGCC |
| siRNA 1452 | 1452 | GCGCGAGUGCCAGCGCUGG | 4476 | CCAGCGCUGGCACUCGCGC |
| siRNA 1453 | 1453 | CGCGAGUGCCAGCGCUGGG | 4477 | CCCAGCGCUGGCACUCGCG |
| siRNA 1454 | 1454 | GCGAGUGCCAGCGCUGGGA | 4478 | UCCCAGCGCUGGCACUCGC |
| siRNA 1455 | 1455 | CGAGUGCCAGCGCUGGGAU | 4479 | AUCCCAGCGCUGGCACUCG |
| siRNA 1456 | 1456 | GAGUGCCAGCGCUGGGAUC | 4480 | GAUCCCAGCGCUGGCACUC |
| siRNA 1457 | 1457 | AGUGCCAGCGCUGGGAUCU | 4481 | AGAUCCCAGCGCUGGCACU |
| siRNA 1458 | 1458 | GUGCCAGCGCUGGGAUCUU | 4482 | AAGAUCCCAGCGCUGGCAC |
| siRNA 1459 | 1459 | UGCCAGCGCUGGGAUCUUC | 4483 | GAAGAUCCCAGCGCUGGCA |
| siRNA 1460 | 1460 | GCCAGCGCUGGGAUCUUCA | 4484 | UGAAGAUCCCAGCGCUGGC |
| siRNA 1461 | 1461 | CCAGCGCUGGGAUCUUCAG | 4485 | CUGAAGAUCCCAGCGCUGG |
| siRNA 1462 | 1462 | CAGCGCUGGGAUCUUCAGC | 4486 | GCUGAAGAUCCCAGCGCUG |
| siRNA 1463 | 1463 | AGCGCUGGGAUCUUCAGCA | 4487 | UGCUGAAGAUCCCAGCGCU |
| siRNA 1464 | 1464 | GCGCUGGGAUCUUCAGCAC | 4488 | GUGCUGAAGAUCCCAGCGC |
| siRNA 1465 | 1465 | CGCUGGGAUCUUCAGCACC | 4489 | GGUGCUGAAGAUCCCAGCG |
| siRNA 1466 | 1466 | GCUGGGAUCUUCAGCACCC | 4490 | GGGUGCUGAAGAUCCCAGC |
| siRNA 1467 | 1467 | CUGGGAUCUUCAGCACCCG | 4491 | CGGGUGCUGAAGAUCCCAG |
| siRNA 1468 | 1468 | UGGGAUCUUCAGCACCCGC | 4492 | GCGGGUGCUGAAGAUCCCA |
| siRNA 1469 | 1469 | GGGAUCUUCAGCACCCGCA | 4493 | UGCGGGUGCUGAAGAUCCC |
| siRNA 1470 | 1470 | GGAUCUUCAGCACCCGCAC | 4494 | GUGCGGGUGCUGAAGAUCC |
| siRNA 1471 | 1471 | GAUCUUCAGCACCCGCACC | 4495 | GGUGCGGGUGCUGAAGAUC |
| siRNA 1472 | 1472 | AUCUUCAGCACCCGCACCA | 4496 | UGGUGCGGGUGCUGAAGAU |
| siRNA 1473 | 1473 | UCUUCAGCACCCGCACCAG | 4497 | CUGGUGCGGGUGCUGAAGA |
| siRNA 1474 | 1474 | CUUCAGCACCCGCACCAGC | 4498 | GCUGGUGCGGGUGCUGAAG |
| siRNA 1475 | 1475 | UUCAGCACCCGCACCAGCA | 4499 | UGCUGGUGCGGGUGCUGAA |
| siRNA 1476 | 1476 | UCAGCACCCGCACCAGCAC | 4500 | GUGCUGGUGCGGGUGCUGA |
| siRNA 1477 | 1477 | CAGCACCCGCACCAGCACC | 4501 | GGUGCUGGUGCGGGUGCUG |
| siRNA 1478 | 1478 | AGCACCCGCACCAGCACCC | 4502 | GGGUGCUGGUGCGGGUGCU |
| siRNA 1479 | 1479 | GCACCCGCACCAGCACCCC | 4503 | GGGGUGCUGGUGCGGGUGC |
| siRNA 1480 | 1480 | CACCCGCACCAGCACCCCU | 4504 | AGGGGUGCUGGUGCGGGUG |
| siRNA 1481 | 1481 | ACCCGCACCAGCACCCCUU | 4505 | AAGGGGUGCUGGUGCGGGU |
| siRNA 1482 | 1482 | CCCGCACCAGCACCCCUUC | 4506 | GAAGGGGUGCUGGUGCGGG |
| siRNA 1483 | 1483 | CCGCACCAGCACCCCUUCG | 4507 | CGAAGGGGUGCUGGUGCGG |
| siRNA 1484 | 1484 | CGCACCAGCACCCCUUCGA | 4508 | UCGAAGGGGUGCUGGUGCG |
| siRNA 1485 | 1485 | GCACCAGCACCCCUUCGAG | 4509 | CUCGAAGGGGUGCUGGUGC |
| siRNA 1486 | 1486 | CACCAGCACCCCUUCGAGC | 4510 | GCUCGAAGGGGUGCUGGUG |
| siRNA 1487 | 1487 | ACCAGCACCCCUUCGAGCC | 4511 | GGCUCGAAGGGGUGCUGGU |
| siRNA 1488 | 1488 | CCAGCACCCCUUCGAGCCG | 4512 | CGGCUCGAAGGGGUGCUGG |
| siRNA 1489 | 1489 | CAGCACCCCUUCGAGCCGG | 4513 | CCGGCUCGAAGGGGUGCUG |
| siRNA 1490 | 1490 | AGCACCCCUUCGAGCCGGG | 4514 | CCCGGCUCGAAGGGGUGCU |
| siRNA 1491 | 1491 | GCACCCCUUCGAGCCGGGC | 4515 | GCCCGGCUCGAAGGGGUGC |
| siRNA 1492 | 1492 | CACCCCUUCGAGCCGGGCA | 4516 | UGCCCGGCUCGAAGGGGUG |
| siRNA 1493 | 1493 | ACCCCUUCGAGCCGGGCAA | 4517 | UUGCCCGGCUCGAAGGGGU |
| siRNA 1494 | 1494 | CCCCUUCGAGCCGGGCAAG | 4518 | CUUGCCCGGCUCGAAGGGG |
| siRNA 1495 | 1495 | CCCUUCGAGCCGGGCAAGU | 4519 | ACUUGCCCGGCUCGAAGGG |
| siRNA 1496 | 1496 | CCUUCGAGCCGGGCAAGUU | 4520 | AACUUGCCCGGCUCGAAGG |
| siRNA 1497 | 1497 | CUUCGAGCCGGGCAAGUUC | 4521 | GAACUUGCCCGGCUCGAAG |
| siRNA 1498 | 1498 | UUCGAGCCGGGCAAGUUCC | 4522 | GGAACUUGCCCGGCUCGAA |
| siRNA 1499 | 1499 | UCGAGCCGGGCAAGUUCCU | 4523 | AGGAACUUGCCCGGCUCGA |
| siRNA 1500 | 1500 | CGAGCCGGGCAAGUUCCUC | 4524 | GAGGAACUUGCCCGGCUCG |
| siRNA 1501 | 1501 | GAGCCGGGCAAGUUCCUCG | 4525 | CGAGGAACUUGCCCGGCUC |
| siRNA 1502 | 1502 | AGCCGGGCAAGUUCCUCGA | 4526 | UCGAGGAACUUGCCCGGCU |
| siRNA 1503 | 1503 | GCCGGGCAAGUUCCUCGAC | 4527 | GUCGAGGAACUUGCCCGGC |
| siRNA 1504 | 1504 | CCGGGCAAGUUCCUCGACC | 4528 | GGUCGAGGAACUUGCCCGG |
| siRNA 1505 | 1505 | CGGGCAAGUUCCUCGACCA | 4529 | UGGUCGAGGAACUUGCCCG |
| siRNA 1506 | 1506 | GGGCAAGUUCCUCGACCAA | 4530 | UUGGUCGAGGAACUUGCCC |
| siRNA 1507 | 1507 | GGCAAGUUCCUCGACCAAG | 4531 | CUUGGUCGAGGAACUUGCC |
| siRNA 1508 | 1508 | GCAAGUUCCUCGACCAAGG | 4532 | CCUUGGUCGAGGAACUUGC |
| siRNA 1509 | 1509 | CAAGUUCCUCGACCAAGGU | 4533 | ACCUUGGUCGAGGAACUUG |
| siRNA 1510 | 1510 | AAGUUCCUCGACCAAGGUC | 4534 | GACCUUGGUCGAGGAACUU |
| siRNA 1511 | 1511 | AGUUCCUCGACCAAGGUCU | 4535 | AGACCUUGGUCGAGGAACU |
| siRNA 1512 | 1512 | GUUCCUCGACCAAGGUCUG | 4536 | CAGACCUUGGUCGAGGAAC |
| siRNA 1513 | 1513 | UUCCUCGACCAAGGUCUGG | 4537 | CCAGACCUUGGUCGAGGAA |
| siRNA 1514 | 1514 | UCCUCGACCAAGGUCUGGA | 4538 | UCCAGACCUUGGUCGAGGA |
| siRNA 1515 | 1515 | CCUCGACCAAGGUCUGGAC | 4539 | GUCCAGACCUUGGUCGAGG |
| siRNA 1516 | 1516 | CUCGACCAAGGUCUGGACG | 4540 | CGUCCAGACCUUGGUCGAG |
| siRNA 1517 | 1517 | UCGACCAAGGUCUGGACGA | 4541 | UCGUCCAGACCUUGGUCGA |
| siRNA 1518 | 1518 | CGACCAAGGUCUGGACGAC | 4542 | GUCGUCCAGACCUUGGUCG |
| siRNA 1519 | 1519 | GACCAAGGUCUGGACGACA | 4543 | UGUCGUCCAGACCUUGGUC |
| siRNA 1520 | 1520 | ACCAAGGUCUGGACGACAA | 4544 | UUGUCGUCCAGACCUUGGU |
| siRNA 1521 | 1521 | CCAAGGUCUGGACGACAAC | 4545 | GUUGUCGUCCAGACCUUGG |
| siRNA 1522 | 1522 | CAAGGUCUGGACGACAACU | 4546 | AGUUGUCGUCCAGACCUUG |
| siRNA 1523 | 1523 | AAGGUCUGGACGACAACUA | 4547 | UAGUUGUCGUCCAGACCUU |
| siRNA 1524 | 1524 | AGGUCUGGACGACAACUAU | 4548 | AUAGUUGUCGUCCAGACCU |
| siRNA 1525 | 1525 | GGUCUGGACGACAACUAUU | 4549 | AAUAGUUGUCGUCCAGACC |
| siRNA 1526 | 1526 | GUCUGGACGACAACUAUUG | 4550 | CAAUAGUUGUCGUCCAGAC |
| siRNA 1527 | 1527 | UCUGGACGACAACUAUUGC | 4551 | GCAAUAGUUGUCGUCCAGA |
| siRNA 1528 | 1528 | CUGGACGACAACUAUUGCC | 4552 | GGCAAUAGUUGUCGUCCAG |
| siRNA 1529 | 1529 | UGGACGACAACUAUUGCCG | 4553 | CGGCAAUAGUUGUCGUCCA |
| siRNA 1530 | 1530 | GGACGACAACUAUUGCCGG | 4554 | CCGGCAAUAGUUGUCGUCC |
| siRNA 1531 | 1531 | GACGACAACUAUUGCCGGA | 4555 | UCCGGCAAUAGUUGUCGUC |
| siRNA 1532 | 1532 | ACGACAACUAUUGCCGGAA | 4556 | UUCCGGCAAUAGUUGUCGU |
| siRNA 1533 | 1533 | CGACAACUAUUGCCGGAAU | 4557 | AUUCCGGCAAUAGUUGUCG |
| siRNA 1534 | 1534 | GACAACUAUUGCCGGAAUC | 4558 | GAUUCCGGCAAUAGUUGUC |
| siRNA 1535 | 1535 | ACAACUAUUGCCGGAAUCC | 4559 | GGAUUCCGGCAAUAGUUGU |
| siRNA 1536 | 1536 | CAACUAUUGCCGGAAUCCU | 4560 | AGGAUUCCGGCAAUAGUUG |
| siRNA 1537 | 1537 | AACUAUUGCCGGAAUCCUG | 4561 | CAGGAUUCCGGCAAUAGUU |
| siRNA 1538 | 1538 | ACUAUUGCCGGAAUCCUGA | 4562 | UCAGGAUUCCGGCAAUAGU |
| siRNA 1539 | 1539 | CUAUUGCCGGAAUCCUGAC | 4563 | GUCAGGAUUCCGGCAAUAG |
| siRNA 1540 | 1540 | UAUUGCCGGAAUCCUGACG | 4564 | CGUCAGGAUUCCGGCAAUA |
| siRNA 1541 | 1541 | AUUGCCGGAAUCCUGACGG | 4565 | CCGUCAGGAUUCCGGCAAU |
| siRNA 1542 | 1542 | UUGCCGGAAUCCUGACGGC | 4566 | GCCGUCAGGAUUCCGGCAA |
| siRNA 1543 | 1543 | UGCCGGAAUCCUGACGGCU | 4567 | AGCCGUCAGGAUUCCGGCA |
| siRNA 1544 | 1544 | GCCGGAAUCCUGACGGCUC | 4568 | GAGCCGUCAGGAUUCCGGC |
| siRNA 1545 | 1545 | CCGGAAUCCUGACGGCUCC | 4569 | GGAGCCGUCAGGAUUCCGG |
| siRNA 1546 | 1546 | CGGAAUCCUGACGGCUCCG | 4570 | CGGAGCCGUCAGGAUUCCG |
| siRNA 1547 | 1547 | GGAAUCCUGACGGCUCCGA | 4571 | UCGGAGCCGUCAGGAUUCC |
| siRNA 1548 | 1548 | GAAUCCUGACGGCUCCGAG | 4572 | CUCGGAGCCGUCAGGAUUC |
| siRNA 1549 | 1549 | AAUCCUGACGGCUCCGAGC | 4573 | GCUCGGAGCCGUCAGGAUU |
| siRNA 1550 | 1550 | AUCCUGACGGCUCCGAGCG | 4574 | CGCUCGGAGCCGUCAGGAU |
| siRNA 1551 | 1551 | UCCUGACGGCUCCGAGCGG | 4575 | CCGCUCGGAGCCGUCAGGA |
| siRNA 1552 | 1552 | CCUGACGGCUCCGAGCGGC | 4576 | GCCGCUCGGAGCCGUCAGG |
| siRNA 1553 | 1553 | CUGACGGCUCCGAGCGGCC | 4577 | GGCCGCUCGGAGCCGUCAG |
| siRNA 1554 | 1554 | UGACGGCUCCGAGCGGCCA | 4578 | UGGCCGCUCGGAGCCGUCA |
| siRNA 1555 | 1555 | GACGGCUCCGAGCGGCCAU | 4579 | AUGGCCGCUCGGAGCCGUC |
| siRNA 1556 | 1556 | ACGGCUCCGAGCGGCCAUG | 4580 | CAUGGCCGCUCGGAGCCGU |
| siRNA 1557 | 1557 | CGGCUCCGAGCGGCCAUGG | 4581 | CCAUGGCCGCUCGGAGCCG |
| siRNA 1558 | 1558 | GGCUCCGAGCGGCCAUGGU | 4582 | ACCAUGGCCGCUCGGAGCC |
| siRNA 1559 | 1559 | GCUCCGAGCGGCCAUGGUG | 4583 | CACCAUGGCCGCUCGGAGC |
| siRNA 1560 | 1560 | CUCCGAGCGGCCAUGGUGC | 4584 | GCACCAUGGCCGCUCGGAG |
| siRNA 1561 | 1561 | UCCGAGCGGCCAUGGUGCU | 4585 | AGCACCAUGGCCGCUCGGA |
| siRNA 1562 | 1562 | CCGAGCGGCCAUGGUGCUA | 4586 | UAGCACCAUGGCCGCUCGG |
| siRNA 1563 | 1563 | CGAGCGGCCAUGGUGCUAC | 4587 | GUAGCACCAUGGCCGCUCG |
| siRNA 1564 | 1564 | GAGCGGCCAUGGUGCUACA | 4588 | UGUAGCACCAUGGCCGCUC |
| siRNA 1565 | 1565 | AGCGGCCAUGGUGCUACAC | 4589 | GUGUAGCACCAUGGCCGCU |
| siRNA 1566 | 1566 | GCGGCCAUGGUGCUACACU | 4590 | AGUGUAGCACCAUGGCCGC |
| siRNA 1567 | 1567 | CGGCCAUGGUGCUACACUA | 4591 | UAGUGUAGCACCAUGGCCG |
| siRNA 1568 | 1568 | GGCCAUGGUGCUACACUAC | 4592 | GUAGUGUAGCACCAUGGCC |
| siRNA 1569 | 1569 | GCCAUGGUGCUACACUACG | 4593 | CGUAGUGUAGCACCAUGGC |
| siRNA 1570 | 1570 | CCAUGGUGCUACACUACGG | 4594 | CCGUAGUGUAGCACCAUGG |
| siRNA 1571 | 1571 | CAUGGUGCUACACUACGGA | 4595 | UCCGUAGUGUAGCACCAUG |
| siRNA 1572 | 1572 | AUGGUGCUACACUACGGAU | 4596 | AUCCGUAGUGUAGCACCAU |
| siRNA 1573 | 1573 | UGGUGCUACACUACGGAUC | 4597 | GAUCCGUAGUGUAGCACCA |
| siRNA 1574 | 1574 | GGUGCUACACUACGGAUCC | 4598 | GGAUCCGUAGUGUAGCACC |
| siRNA 1575 | 1575 | GUGCUACACUACGGAUCCG | 4599 | CGGAUCCGUAGUGUAGCAC |
| siRNA 1576 | 1576 | UGCUACACUACGGAUCCGC | 4600 | GCGGAUCCGUAGUGUAGCA |
| siRNA 1577 | 1577 | GCUACACUACGGAUCCGCA | 4601 | UGCGGAUCCGUAGUGUAGC |
| siRNA 1578 | 1578 | CUACACUACGGAUCCGCAG | 4602 | CUGCGGAUCCGUAGUGUAG |
| siRNA 1579 | 1579 | UACACUACGGAUCCGCAGA | 4603 | UCUGCGGAUCCGUAGUGUA |
| siRNA 1580 | 1580 | ACACUACGGAUCCGCAGAU | 4604 | AUCUGCGGAUCCGUAGUGU |
| siRNA 1581 | 1581 | CACUACGGAUCCGCAGAUC | 4605 | GAUCUGCGGAUCCGUAGUG |
| siRNA 1582 | 1582 | ACUACGGAUCCGCAGAUCG | 4606 | CGAUCUGCGGAUCCGUAGU |
| siRNA 1583 | 1583 | CUACGGAUCCGCAGAUCGA | 4607 | UCGAUCUGCGGAUCCGUAG |
| siRNA 1584 | 1584 | UACGGAUCCGCAGAUCGAG | 4608 | CUCGAUCUGCGGAUCCGUA |
| siRNA 1585 | 1585 | ACGGAUCCGCAGAUCGAGC | 4609 | GCUCGAUCUGCGGAUCCGU |
| siRNA 1586 | 1586 | CGGAUCCGCAGAUCGAGCG | 4610 | CGCUCGAUCUGCGGAUCCG |
| siRNA 1587 | 1587 | GGAUCCGCAGAUCGAGCGA | 4611 | UCGCUCGAUCUGCGGAUCC |
| siRNA 1588 | 1588 | GAUCCGCAGAUCGAGCGAG | 4612 | CUCGCUCGAUCUGCGGAUC |
| siRNA 1589 | 1589 | AUCCGCAGAUCGAGCGAGA | 4613 | UCUCGCUCGAUCUGCGGAU |
| siRNA 1590 | 1590 | UCCGCAGAUCGAGCGAGAG | 4614 | CUCUCGCUCGAUCUGCGGA |
| siRNA 1591 | 1591 | CCGCAGAUCGAGCGAGAGU | 4615 | ACUCUCGCUCGAUCUGCGG |
| siRNA 1592 | 1592 | CGCAGAUCGAGCGAGAGUU | 4616 | AACUCUCGCUCGAUCUGCG |
| siRNA 1593 | 1593 | GCAGAUCGAGCGAGAGUUC | 4617 | GAACUCUCGCUCGAUCUGC |
| siRNA 1594 | 1594 | CAGAUCGAGCGAGAGUUCU | 4618 | AGAACUCUCGCUCGAUCUG |
| siRNA 1595 | 1595 | AGAUCGAGCGAGAGUUCUG | 4619 | CAGAACUCUCGCUCGAUCU |
| siRNA 1596 | 1596 | GAUCGAGCGAGAGUUCUGU | 4620 | ACAGAACUCUCGCUCGAUC |
| siRNA 1597 | 1597 | AUCGAGCGAGAGUUCUGUG | 4621 | CACAGAACUCUCGCUCGAU |
| siRNA 1598 | 1598 | UCGAGCGAGAGUUCUGUGA | 4622 | UCACAGAACUCUCGCUCGA |
| siRNA 1599 | 1599 | CGAGCGAGAGUUCUGUGAC | 4623 | GUCACAGAACUCUCGCUCG |
| siRNA 1600 | 1600 | GAGCGAGAGUUCUGUGACC | 4624 | GGUCACAGAACUCUCGCUC |
| siRNA 1601 | 1601 | AGCGAGAGUUCUGUGACCU | 4625 | AGGUCACAGAACUCUCGCU |
| siRNA 1602 | 1602 | GCGAGAGUUCUGUGACCUC | 4626 | GAGGUCACAGAACUCUCGC |
| siRNA 1603 | 1603 | CGAGAGUUCUGUGACCUCC | 4627 | GGAGGUCACAGAACUCUCG |
| siRNA 1604 | 1604 | GAGAGUUCUGUGACCUCCC | 4628 | GGGAGGUCACAGAACUCUC |
| siRNA 1605 | 1605 | AGAGUUCUGUGACCUCCCC | 4629 | GGGGAGGUCACAGAACUCU |
| siRNA 1606 | 1606 | GAGUUCUGUGACCUCCCCC | 4630 | GGGGGAGGUCACAGAACUC |
| siRNA 1607 | 1607 | AGUUCUGUGACCUCCCCCG | 4631 | CGGGGGAGGUCACAGAACU |
| siRNA 1608 | 1608 | GUUCUGUGACCUCCCCCGC | 4632 | GCGGGGGAGGUCACAGAAC |
| siRNA 1609 | 1609 | UUCUGUGACCUCCCCCGCU | 4633 | AGCGGGGGAGGUCACAGAA |
| siRNA 1610 | 1610 | UCUGUGACCUCCCCCGCUG | 4634 | CAGCGGGGGAGGUCACAGA |
| siRNA 1611 | 1611 | CUGUGACCUCCCCCGCUGC | 4635 | GCAGCGGGGGAGGUCACAG |
| siRNA 1612 | 1612 | UGUGACCUCCCCCGCUGCG | 4636 | CGCAGCGGGGGAGGUCACA |
| siRNA 1613 | 1613 | GUGACCUCCCCCGCUGCGG | 4637 | CCGCAGCGGGGGAGGUCAC |
| siRNA 1614 | 1614 | UGACCUCCCCCGCUGCGGG | 4638 | CCCGCAGCGGGGGAGGUCA |
| siRNA 1615 | 1615 | GACCUCCCCCGCUGCGGGU | 4639 | ACCCGCAGCGGGGGAGGUC |
| siRNA 1616 | 1616 | ACCUCCCCCGCUGCGGGUC | 4640 | GACCCGCAGCGGGGGAGGU |
| siRNA 1617 | 1617 | CCUCCCCCGCUGCGGGUCC | 4641 | GGACCCGCAGCGGGGGAGG |
| siRNA 1618 | 1618 | CUCCCCCGCUGCGGGUCCG | 4642 | CGGACCCGCAGCGGGGGAG |
| siRNA 1619 | 1619 | UCCCCCGCUGCGGGUCCGA | 4643 | UCGGACCCGCAGCGGGGGA |
| siRNA 1620 | 1620 | CCCCCGCUGCGGGUCCGAG | 4644 | CUCGGACCCGCAGCGGGGG |
| siRNA 1621 | 1621 | CCCCGCUGCGGGUCCGAGG | 4645 | CCUCGGACCCGCAGCGGGG |
| siRNA 1622 | 1622 | CCCGCUGCGGGUCCGAGGC | 4646 | GCCUCGGACCCGCAGCGGG |
| siRNA 1623 | 1623 | CCGCUGCGGGUCCGAGGCA | 4647 | UGCCUCGGACCCGCAGCGG |
| siRNA 1624 | 1624 | CGCUGCGGGUCCGAGGCAC | 4648 | GUGCCUCGGACCCGCAGCG |
| siRNA 1625 | 1625 | GCUGCGGGUCCGAGGCACA | 4649 | UGUGCCUCGGACCCGCAGC |
| siRNA 1626 | 1626 | CUGCGGGUCCGAGGCACAG | 4650 | CUGUGCCUCGGACCCGCAG |
| siRNA 1627 | 1627 | UGCGGGUCCGAGGCACAGC | 4651 | GCUGUGCCUCGGACCCGCA |
| siRNA 1628 | 1628 | GCGGGUCCGAGGCACAGCC | 4652 | GGCUGUGCCUCGGACCCGC |
| siRNA 1629 | 1629 | CGGGUCCGAGGCACAGCCC | 4653 | GGGCUGUGCCUCGGACCCG |
| siRNA 1630 | 1630 | GGGUCCGAGGCACAGCCCC | 4654 | GGGGCUGUGCCUCGGACCC |
| siRNA 1631 | 1631 | GGUCCGAGGCACAGCCCCG | 4655 | CGGGGCUGUGCCUCGGACC |
| siRNA 1632 | 1632 | GUCCGAGGCACAGCCCCGC | 4656 | GCGGGGCUGUGCCUCGGAC |
| siRNA 1633 | 1633 | UCCGAGGCACAGCCCCGCC | 4657 | GGCGGGGCUGUGCCUCGGA |
| siRNA 1634 | 1634 | CCGAGGCACAGCCCCGCCA | 4658 | UGGCGGGGCUGUGCCUCGG |
| siRNA 1635 | 1635 | CGAGGCACAGCCCCGCCAA | 4659 | UUGGCGGGGCUGUGCCUCG |
| siRNA 1636 | 1636 | GAGGCACAGCCCCGCCAAG | 4660 | CUUGGCGGGGCUGUGCCUC |
| siRNA 1637 | 1637 | AGGCACAGCCCCGCCAAGA | 4661 | UCUUGGCGGGGCUGUGCCU |
| siRNA 1638 | 1638 | GGCACAGCCCCGCCAAGAG | 4662 | CUCUUGGCGGGGCUGUGCC |
| siRNA 1639 | 1639 | GCACAGCCCCGCCAAGAGG | 4663 | CCUCUUGGCGGGGCUGUGC |
| siRNA 1640 | 1640 | CACAGCCCCGCCAAGAGGC | 4664 | GCCUCUUGGCGGGGCUGUG |
| siRNA 1641 | 1641 | ACAGCCCCGCCAAGAGGCC | 4665 | GGCCUCUUGGCGGGGCUGU |
| siRNA 1642 | 1642 | CAGCCCCGCCAAGAGGCCA | 4666 | UGGCCUCUUGGCGGGGCUG |
| siRNA 1643 | 1643 | AGCCCCGCCAAGAGGCCAC | 4667 | GUGGCCUCUUGGCGGGGCU |
| siRNA 1644 | 1644 | GCCCCGCCAAGAGGCCACA | 4668 | UGUGGCCUCUUGGCGGGGC |
| siRNA 1645 | 1645 | CCCCGCCAAGAGGCCACAA | 4669 | UUGUGGCCUCUUGGCGGGG |
| siRNA 1646 | 1646 | CCCGCCAAGAGGCCACAAC | 4670 | GUUGUGGCCUCUUGGCGGG |
| siRNA 1647 | 1647 | CCGCCAAGAGGCCACAACU | 4671 | AGUUGUGGCCUCUUGGCGG |
| siRNA 1648 | 1648 | CGCCAAGAGGCCACAACUG | 4672 | CAGUUGUGGCCUCUUGGCG |
| siRNA 1649 | 1649 | GCCAAGAGGCCACAACUGU | 4673 | ACAGUUGUGGCCUCUUGGC |
| siRNA 1650 | 1650 | CCAAGAGGCCACAACUGUC | 4674 | GACAGUUGUGGCCUCUUGG |
| siRNA 1651 | 1651 | CAAGAGGCCACAACUGUCA | 4675 | UGACAGUUGUGGCCUCUUG |
| siRNA 1652 | 1652 | AAGAGGCCACAACUGUCAG | 4676 | CUGACAGUUGUGGCCUCUU |
| siRNA 1653 | 1653 | AGAGGCCACAACUGUCAGC | 4677 | GCUGACAGUUGUGGCCUCU |
| siRNA 1654 | 1654 | GAGGCCACAACUGUCAGCU | 4678 | AGCUGACAGUUGUGGCCUC |
| siRNA 1655 | 1655 | AGGCCACAACUGUCAGCUG | 4679 | CAGCUGACAGUUGUGGCCU |
| siRNA 1656 | 1656 | GGCCACAACUGUCAGCUGC | 4680 | GCAGCUGACAGUUGUGGCC |
| siRNA 1657 | 1657 | GCCACAACUGUCAGCUGCU | 4681 | AGCAGCUGACAGUUGUGGC |
| siRNA 1658 | 1658 | CCACAACUGUCAGCUGCUU | 4682 | AAGCAGCUGACAGUUGUGG |
| siRNA 1659 | 1659 | CACAACUGUCAGCUGCUUC | 4683 | GAAGCAGCUGACAGUUGUG |
| siRNA 1660 | 1660 | ACAACUGUCAGCUGCUUCC | 4684 | GGAAGCAGCUGACAGUUGU |
| siRNA 1661 | 1661 | CAACUGUCAGCUGCUUCCG | 4685 | CGGAAGCAGCUGACAGUUG |
| siRNA 1662 | 1662 | AACUGUCAGCUGCUUCCGC | 4686 | GCGGAAGCAGCUGACAGUU |
| siRNA 1663 | 1663 | ACUGUCAGCUGCUUCCGCG | 4687 | CGCGGAAGCAGCUGACAGU |
| siRNA 1664 | 1664 | CUGUCAGCUGCUUCCGCGG | 4688 | CCGCGGAAGCAGCUGACAG |
| siRNA 1665 | 1665 | UGUCAGCUGCUUCCGCGGG | 4689 | CCCGCGGAAGCAGCUGACA |
| siRNA 1666 | 1666 | GUCAGCUGCUUCCGCGGGA | 4690 | UCCCGCGGAAGCAGCUGAC |
| siRNA 1667 | 1667 | UCAGCUGCUUCCGCGGGAA | 4691 | UUCCCGCGGAAGCAGCUGA |
| siRNA 1668 | 1668 | CAGCUGCUUCCGCGGGAAG | 4692 | CUUCCCGCGGAAGCAGCUG |
| siRNA 1669 | 1669 | AGCUGCUUCCGCGGGAAGG | 4693 | CCUUCCCGCGGAAGCAGCU |
| siRNA 1670 | 1670 | GCUGCUUCCGCGGGAAGGG | 4694 | CCCUUCCCGCGGAAGCAGC |
| siRNA 1671 | 1671 | CUGCUUCCGCGGGAAGGGU | 4695 | ACCCUUCCCGCGGAAGCAG |
| siRNA 1672 | 1672 | UGCUUCCGCGGGAAGGGUG | 4696 | CACCCUUCCCGCGGAAGCA |
| siRNA 1673 | 1673 | GCUUCCGCGGGAAGGGUGA | 4697 | UCACCCUUCCCGCGGAAGC |
| siRNA 1674 | 1674 | CUUCCGCGGGAAGGGUGAG | 4698 | CUCACCCUUCCCGCGGAAG |
| siRNA 1675 | 1675 | UUCCGCGGGAAGGGUGAGG | 4699 | CCUCACCCUUCCCGCGGAA |
| siRNA 1676 | 1676 | UCCGCGGGAAGGGUGAGGG | 4700 | CCCUCACCCUUCCCGCGGA |
| siRNA 1677 | 1677 | CCGCGGGAAGGGUGAGGGC | 4701 | GCCCUCACCCUUCCCGCGG |
| siRNA 1678 | 1678 | CGCGGGAAGGGUGAGGGCU | 4702 | AGCCCUCACCCUUCCCGCG |
| siRNA 1679 | 1679 | GCGGGAAGGGUGAGGGCUA | 4703 | UAGCCCUCACCCUUCCCGC |
| siRNA 1680 | 1680 | CGGGAAGGGUGAGGGCUAC | 4704 | GUAGCCCUCACCCUUCCCG |
| siRNA 1681 | 1681 | GGGAAGGGUGAGGGCUACC | 4705 | GGUAGCCCUCACCCUUCCC |
| siRNA 1682 | 1682 | GGAAGGGUGAGGGCUACCG | 4706 | CGGUAGCCCUCACCCUUCC |
| siRNA 1683 | 1683 | GAAGGGUGAGGGCUACCGG | 4707 | CCGGUAGCCCUCACCCUUC |
| siRNA 1684 | 1684 | AAGGGUGAGGGCUACCGGG | 4708 | CCCGGUAGCCCUCACCCUU |
| siRNA 1685 | 1685 | AGGGUGAGGGCUACCGGGG | 4709 | CCCCGGUAGCCCUCACCCU |
| siRNA 1686 | 1686 | GGGUGAGGGCUACCGGGGC | 4710 | GCCCCGGUAGCCCUCACCC |
| siRNA 1687 | 1687 | GGUGAGGGCUACCGGGGCA | 4711 | UGCCCCGGUAGCCCUCACC |
| siRNA 1688 | 1688 | GUGAGGGCUACCGGGGCAC | 4712 | GUGCCCCGGUAGCCCUCAC |
| siRNA 1689 | 1689 | UGAGGGCUACCGGGGCACA | 4713 | UGUGCCCCGGUAGCCCUCA |
| siRNA 1690 | 1690 | GAGGGCUACCGGGGCACAG | 4714 | CUGUGCCCCGGUAGCCCUC |
| siRNA 1691 | 1691 | AGGGCUACCGGGGCACAGC | 4715 | GCUGUGCCCCGGUAGCCCU |
| siRNA 1692 | 1692 | GGGCUACCGGGGCACAGCC | 4716 | GGCUGUGCCCCGGUAGCCC |
| siRNA 1693 | 1693 | GGCUACCGGGGCACAGCCA | 4717 | UGGCUGUGCCCCGGUAGCC |
| siRNA 1694 | 1694 | GCUACCGGGGCACAGCCAA | 4718 | UUGGCUGUGCCCCGGUAGC |
| siRNA 1695 | 1695 | CUACCGGGGCACAGCCAAU | 4719 | AUUGGCUGUGCCCCGGUAG |
| siRNA 1696 | 1696 | UACCGGGGCACAGCCAAUA | 4720 | UAUUGGCUGUGCCCCGGUA |
| siRNA 1697 | 1697 | ACCGGGGCACAGCCAAUAC | 4721 | GUAUUGGCUGUGCCCCGGU |
| siRNA 1698 | 1698 | CCGGGGCACAGCCAAUACC | 4722 | GGUAUUGGCUGUGCCCCGG |
| siRNA 1699 | 1699 | CGGGGCACAGCCAAUACCA | 4723 | UGGUAUUGGCUGUGCCCCG |
| siRNA 1700 | 1700 | GGGGCACAGCCAAUACCAC | 4724 | GUGGUAUUGGCUGUGCCCC |
| siRNA 1701 | 1701 | GGGCACAGCCAAUACCACC | 4725 | GGUGGUAUUGGCUGUGCCC |
| siRNA 1702 | 1702 | GGCACAGCCAAUACCACCA | 4726 | UGGUGGUAUUGGCUGUGCC |
| siRNA 1703 | 1703 | GCACAGCCAAUACCACCAC | 4727 | GUGGUGGUAUUGGCUGUGC |
| siRNA 1704 | 1704 | CACAGCCAAUACCACCACU | 4728 | AGUGGUGGUAUUGGCUGUG |
| siRNA 1705 | 1705 | ACAGCCAAUACCACCACUG | 4729 | CAGUGGUGGUAUUGGCUGU |
| siRNA 1706 | 1706 | CAGCCAAUACCACCACUGC | 4730 | GCAGUGGUGGUAUUGGCUG |
| siRNA 1707 | 1707 | AGCCAAUACCACCACUGCG | 4731 | CGCAGUGGUGGUAUUGGCU |
| siRNA 1708 | 1708 | GCCAAUACCACCACUGCGG | 4732 | CCGCAGUGGUGGUAUUGGC |
| siRNA 1709 | 1709 | CCAAUACCACCACUGCGGG | 4733 | CCCGCAGUGGUGGUAUUGG |
| siRNA 1710 | 1710 | CAAUACCACCACUGCGGGC | 4734 | GCCCGCAGUGGUGGUAUUG |
| siRNA 1711 | 1711 | AAUACCACCACUGCGGGCG | 4735 | CGCCCGCAGUGGUGGUAUU |
| siRNA 1712 | 1712 | AUACCACCACUGCGGGCGU | 4736 | ACGCCCGCAGUGGUGGUAU |
| siRNA 1713 | 1713 | UACCACCACUGCGGGCGUA | 4737 | UACGCCCGCAGUGGUGGUA |
| siRNA 1714 | 1714 | ACCACCACUGCGGGCGUAC | 4738 | GUACGCCCGCAGUGGUGGU |
| siRNA 1715 | 1715 | CCACCACUGCGGGCGUACC | 4739 | GGUACGCCCGCAGUGGUGG |
| siRNA 1716 | 1716 | CACCACUGCGGGCGUACCU | 4740 | AGGUACGCCCGCAGUGGUG |
| siRNA 1717 | 1717 | ACCACUGCGGGCGUACCUU | 4741 | AAGGUACGCCCGCAGUGGU |
| siRNA 1718 | 1718 | CCACUGCGGGCGUACCUUG | 4742 | CAAGGUACGCCCGCAGUGG |
| siRNA 1719 | 1719 | CACUGCGGGCGUACCUUGC | 4743 | GCAAGGUACGCCCGCAGUG |
| siRNA 1720 | 1720 | ACUGCGGGCGUACCUUGCC | 4744 | GGCAAGGUACGCCCGCAGU |
| siRNA 1721 | 1721 | CUGCGGGCGUACCUUGCCA | 4745 | UGGCAAGGUACGCCCGCAG |
| siRNA 1722 | 1722 | UGCGGGCGUACCUUGCCAG | 4746 | CUGGCAAGGUACGCCCGCA |
| siRNA 1723 | 1723 | GCGGGCGUACCUUGCCAGC | 4747 | GCUGGCAAGGUACGCCCGC |
| siRNA 1724 | 1724 | CGGGCGUACCUUGCCAGCG | 4748 | CGCUGGCAAGGUACGCCCG |
| siRNA 1725 | 1725 | GGGCGUACCUUGCCAGCGU | 4749 | ACGCUGGCAAGGUACGCCC |
| siRNA 1726 | 1726 | GGCGUACCUUGCCAGCGUU | 4750 | AACGCUGGCAAGGUACGCC |
| siRNA 1727 | 1727 | GCGUACCUUGCCAGCGUUG | 4751 | CAACGCUGGCAAGGUACGC |
| siRNA 1728 | 1728 | CGUACCUUGCCAGCGUUGG | 4752 | CCAACGCUGGCAAGGUACG |
| siRNA 1729 | 1729 | GUACCUUGCCAGCGUUGGG | 4753 | CCCAACGCUGGCAAGGUAC |
| siRNA 1730 | 1730 | UACCUUGCCAGCGUUGGGA | 4754 | UCCCAACGCUGGCAAGGUA |
| siRNA 1731 | 1731 | ACCUUGCCAGCGUUGGGAC | 4755 | GUCCCAACGCUGGCAAGGU |
| siRNA 1732 | 1732 | CCUUGCCAGCGUUGGGACG | 4756 | CGUCCCAACGCUGGCAAGG |
| siRNA 1733 | 1733 | CUUGCCAGCGUUGGGACGC | 4757 | GCGUCCCAACGCUGGCAAG |
| siRNA 1734 | 1734 | UUGCCAGCGUUGGGACGCG | 4758 | CGCGUCCCAACGCUGGCAA |
| siRNA 1735 | 1735 | UGCCAGCGUUGGGACGCGC | 4759 | GCGCGUCCCAACGCUGGCA |
| siRNA 1736 | 1736 | GCCAGCGUUGGGACGCGCA | 4760 | UGCGCGUCCCAACGCUGGC |
| siRNA 1737 | 1737 | CCAGCGUUGGGACGCGCAA | 4761 | UUGCGCGUCCCAACGCUGG |
| siRNA 1738 | 1738 | CAGCGUUGGGACGCGCAAA | 4762 | UUUGCGCGUCCCAACGCUG |
| siRNA 1739 | 1739 | AGCGUUGGGACGCGCAAAU | 4763 | AUUUGCGCGUCCCAACGCU |
| siRNA 1740 | 1740 | GCGUUGGGACGCGCAAAUC | 4764 | GAUUUGCGCGUCCCAACGC |
| siRNA 1741 | 1741 | CGUUGGGACGCGCAAAUCC | 4765 | GGAUUUGCGCGUCCCAACG |
| siRNA 1742 | 1742 | GUUGGGACGCGCAAAUCCC | 4766 | GGGAUUUGCGCGUCCCAAC |
| siRNA 1743 | 1743 | UUGGGACGCGCAAAUCCCG | 4767 | CGGGAUUUGCGCGUCCCAA |
| siRNA 1744 | 1744 | UGGGACGCGCAAAUCCCGC | 4768 | GCGGGAUUUGCGCGUCCCA |
| siRNA 1745 | 1745 | GGGACGCGCAAAUCCCGCA | 4769 | UGCGGGAUUUGCGCGUCCC |
| siRNA 1746 | 1746 | GGACGCGCAAAUCCCGCAU | 4770 | AUGCGGGAUUUGCGCGUCC |
| siRNA 1747 | 1747 | GACGCGCAAAUCCCGCAUC | 4771 | GAUGCGGGAUUUGCGCGUC |
| siRNA 1748 | 1748 | ACGCGCAAAUCCCGCAUCA | 4772 | UGAUGCGGGAUUUGCGCGU |
| siRNA 1749 | 1749 | CGCGCAAAUCCCGCAUCAG | 4773 | CUGAUGCGGGAUUUGCGCG |
| siRNA 1750 | 1750 | GCGCAAAUCCCGCAUCAGC | 4774 | GCUGAUGCGGGAUUUGCGC |
| siRNA 1751 | 1751 | CGCAAAUCCCGCAUCAGCA | 4775 | UGCUGAUGCGGGAUUUGCG |
| siRNA 1752 | 1752 | GCAAAUCCCGCAUCAGCAC | 4776 | GUGCUGAUGCGGGAUUUGC |
| siRNA 1753 | 1753 | CAAAUCCCGCAUCAGCACC | 4777 | GGUGCUGAUGCGGGAUUUG |
| siRNA 1754 | 1754 | AAAUCCCGCAUCAGCACCG | 4778 | CGGUGCUGAUGCGGGAUUU |
| siRNA 1755 | 1755 | AAUCCCGCAUCAGCACCGA | 4779 | UCGGUGCUGAUGCGGGAUU |
| siRNA 1756 | 1756 | AUCCCGCAUCAGCACCGAU | 4780 | AUCGGUGCUGAUGCGGGAU |
| siRNA 1757 | 1757 | UCCCGCAUCAGCACCGAUU | 4781 | AAUCGGUGCUGAUGCGGGA |
| siRNA 1758 | 1758 | CCCGCAUCAGCACCGAUUU | 4782 | AAAUCGGUGCUGAUGCGGG |
| siRNA 1759 | 1759 | CCGCAUCAGCACCGAUUUA | 4783 | UAAAUCGGUGCUGAUGCGG |
| siRNA 1760 | 1760 | CGCAUCAGCACCGAUUUAC | 4784 | GUAAAUCGGUGCUGAUGCG |
| siRNA 1761 | 1761 | GCAUCAGCACCGAUUUACG | 4785 | CGUAAAUCGGUGCUGAUGC |
| siRNA 1762 | 1762 | CAUCAGCACCGAUUUACGC | 4786 | GCGUAAAUCGGUGCUGAUG |
| siRNA 1763 | 1763 | AUCAGCACCGAUUUACGCC | 4787 | GGCGUAAAUCGGUGCUGAU |
| siRNA 1764 | 1764 | UCAGCACCGAUUUACGCCA | 4788 | UGGCGUAAAUCGGUGCUGA |
| siRNA 1765 | 1765 | CAGCACCGAUUUACGCCAG | 4789 | CUGGCGUAAAUCGGUGCUG |
| siRNA 1766 | 1766 | AGCACCGAUUUACGCCAGA | 4790 | UCUGGCGUAAAUCGGUGCU |
| siRNA 1767 | 1767 | GCACCGAUUUACGCCAGAA | 4791 | UUCUGGCGUAAAUCGGUGC |
| siRNA 1768 | 1768 | CACCGAUUUACGCCAGAAA | 4792 | UUUCUGGCGUAAAUCGGUG |
| siRNA 1769 | 1769 | ACCGAUUUACGCCAGAAAA | 4793 | UUUUCUGGCGUAAAUCGGU |
| siRNA 1770 | 1770 | CCGAUUUACGCCAGAAAAA | 4794 | UUUUUCUGGCGUAAAUCGG |
| siRNA 1771 | 1771 | CGAUUUACGCCAGAAAAAU | 4795 | AUUUUUCUGGCGUAAAUCG |
| siRNA 1772 | 1772 | GAUUUACGCCAGAAAAAUA | 4796 | UAUUUUUCUGGCGUAAAUC |
| siRNA 1773 | 1773 | AUUUACGCCAGAAAAAUAC | 4797 | GUAUUUUUCUGGCGUAAAU |
| siRNA 1774 | 1774 | UUUACGCCAGAAAAAUACG | 4798 | CGUAUUUUUCUGGCGUAAA |
| siRNA 1775 | 1775 | UUACGCCAGAAAAAUACGC | 4799 | GCGUAUUUUUCUGGCGUAA |
| siRNA 1776 | 1776 | UACGCCAGAAAAAUACGCG | 4800 | CGCGUAUUUUUCUGGCGUA |
| siRNA 1777 | 1777 | ACGCCAGAAAAAUACGCGU | 4801 | ACGCGUAUUUUUCUGGCGU |
| siRNA 1778 | 1778 | CGCCAGAAAAAUACGCGUG | 4802 | CACGCGUAUUUUUCUGGCG |
| siRNA 1779 | 1779 | GCCAGAAAAAUACGCGUGC | 4803 | GCACGCGUAUUUUUCUGGC |
| siRNA 1780 | 1780 | CCAGAAAAAUACGCGUGCA | 4804 | UGCACGCGUAUUUUUCUGG |
| siRNA 1781 | 1781 | CAGAAAAAUACGCGUGCAA | 4805 | UUGCACGCGUAUUUUUCUG |
| siRNA 1782 | 1782 | AGAAAAAUACGCGUGCAAA | 4806 | UUUGCACGCGUAUUUUUCU |
| siRNA 1783 | 1783 | GAAAAAUACGCGUGCAAAG | 4807 | CUUUGCACGCGUAUUUUUC |
| siRNA 1784 | 1784 | AAAAAUACGCGUGCAAAGA | 4808 | UCUUUGCACGCGUAUUUUU |
| siRNA 1785 | 1785 | AAAAUACGCGUGCAAAGAC | 4809 | GUCUUUGCACGCGUAUUUU |
| siRNA 1786 | 1786 | AAAUACGCGUGCAAAGACC | 4810 | GGUCUUUGCACGCGUAUUU |
| siRNA 1787 | 1787 | AAUACGCGUGCAAAGACCU | 4811 | AGGUCUUUGCACGCGUAUU |
| siRNA 1788 | 1788 | AUACGCGUGCAAAGACCUU | 4812 | AAGGUCUUUGCACGCGUAU |
| siRNA 1789 | 1789 | UACGCGUGCAAAGACCUUC | 4813 | GAAGGUCUUUGCACGCGUA |
| siRNA 1790 | 1790 | ACGCGUGCAAAGACCUUCG | 4814 | CGAAGGUCUUUGCACGCGU |
| siRNA 1791 | 1791 | CGCGUGCAAAGACCUUCGG | 4815 | CCGAAGGUCUUUGCACGCG |
| siRNA 1792 | 1792 | GCGUGCAAAGACCUUCGGG | 4816 | CCCGAAGGUCUUUGCACGC |
| siRNA 1793 | 1793 | CGUGCAAAGACCUUCGGGA | 4817 | UCCCGAAGGUCUUUGCACG |
| siRNA 1794 | 1794 | GUGCAAAGACCUUCGGGAG | 4818 | CUCCCGAAGGUCUUUGCAC |
| siRNA 1795 | 1795 | UGCAAAGACCUUCGGGAGA | 4819 | UCUCCCGAAGGUCUUUGCA |
| siRNA 1796 | 1796 | GCAAAGACCUUCGGGAGAA | 4820 | UUCUCCCGAAGGUCUUUGC |
| siRNA 1797 | 1797 | CAAAGACCUUCGGGAGAAC | 4821 | GUUCUCCCGAAGGUCUUUG |
| siRNA 1798 | 1798 | AAAGACCUUCGGGAGAACU | 4822 | AGUUCUCCCGAAGGUCUUU |
| siRNA 1799 | 1799 | AAGACCUUCGGGAGAACUU | 4823 | AAGUUCUCCCGAAGGUCUU |
| siRNA 1800 | 1800 | AGACCUUCGGGAGAACUUC | 4824 | GAAGUUCUCCCGAAGGUCU |
| siRNA 1801 | 1801 | GACCUUCGGGAGAACUUCU | 4825 | AGAAGUUCUCCCGAAGGUC |
| siRNA 1802 | 1802 | ACCUUCGGGAGAACUUCUG | 4826 | CAGAAGUUCUCCCGAAGGU |
| siRNA 1803 | 1803 | CCUUCGGGAGAACUUCUGC | 4827 | GCAGAAGUUCUCCCGAAGG |
| siRNA 1804 | 1804 | CUUCGGGAGAACUUCUGCC | 4828 | GGCAGAAGUUCUCCCGAAG |
| siRNA 1805 | 1805 | UUCGGGAGAACUUCUGCCG | 4829 | CGGCAGAAGUUCUCCCGAA |
| siRNA 1806 | 1806 | UCGGGAGAACUUCUGCCGG | 4830 | CCGGCAGAAGUUCUCCCGA |
| siRNA 1807 | 1807 | CGGGAGAACUUCUGCCGGA | 4831 | UCCGGCAGAAGUUCUCCCG |
| siRNA 1808 | 1808 | GGGAGAACUUCUGCCGGAA | 4832 | UUCCGGCAGAAGUUCUCCC |
| siRNA 1809 | 1809 | GGAGAACUUCUGCCGGAAC | 4833 | GUUCCGGCAGAAGUUCUCC |
| siRNA 1810 | 1810 | GAGAACUUCUGCCGGAACC | 4834 | GGUUCCGGCAGAAGUUCUC |
| siRNA 1811 | 1811 | AGAACUUCUGCCGGAACCC | 4835 | GGGUUCCGGCAGAAGUUCU |
| siRNA 1812 | 1812 | GAACUUCUGCCGGAACCCC | 4836 | GGGGUUCCGGCAGAAGUUC |
| siRNA 1813 | 1813 | AACUUCUGCCGGAACCCCG | 4837 | CGGGGUUCCGGCAGAAGUU |
| siRNA 1814 | 1814 | ACUUCUGCCGGAACCCCGA | 4838 | UCGGGGUUCCGGCAGAAGU |
| siRNA 1815 | 1815 | CUUCUGCCGGAACCCCGAC | 4839 | GUCGGGGUUCCGGCAGAAG |
| siRNA 1816 | 1816 | UUCUGCCGGAACCCCGACG | 4840 | CGUCGGGGUUCCGGCAGAA |
| siRNA 1817 | 1817 | UCUGCCGGAACCCCGACGG | 4841 | CCGUCGGGGUUCCGGCAGA |
| siRNA 1818 | 1818 | CUGCCGGAACCCCGACGGC | 4842 | GCCGUCGGGGUUCCGGCAG |
| siRNA 1819 | 1819 | UGCCGGAACCCCGACGGCU | 4843 | AGCCGUCGGGGUUCCGGCA |
| siRNA 1820 | 1820 | GCCGGAACCCCGACGGCUC | 4844 | GAGCCGUCGGGGUUCCGGC |
| siRNA 1821 | 1821 | CCGGAACCCCGACGGCUCA | 4845 | UGAGCCGUCGGGGUUCCGG |
| siRNA 1822 | 1822 | CGGAACCCCGACGGCUCAG | 4846 | CUGAGCCGUCGGGGUUCCG |
| siRNA 1823 | 1823 | GGAACCCCGACGGCUCAGA | 4847 | UCUGAGCCGUCGGGGUUCC |
| siRNA 1824 | 1824 | GAACCCCGACGGCUCAGAG | 4848 | CUCUGAGCCGUCGGGGUUC |
| siRNA 1825 | 1825 | AACCCCGACGGCUCAGAGG | 4849 | CCUCUGAGCCGUCGGGGUU |
| siRNA 1826 | 1826 | ACCCCGACGGCUCAGAGGC | 4850 | GCCUCUGAGCCGUCGGGGU |
| siRNA 1827 | 1827 | CCCCGACGGCUCAGAGGCG | 4851 | CGCCUCUGAGCCGUCGGGG |
| siRNA 1828 | 1828 | CCCGACGGCUCAGAGGCGC | 4852 | GCGCCUCUGAGCCGUCGGG |
| siRNA 1829 | 1829 | CCGACGGCUCAGAGGCGCC | 4853 | GGCGCCUCUGAGCCGUCGG |
| siRNA 1830 | 1830 | CGACGGCUCAGAGGCGCCC | 4854 | GGGCGCCUCUGAGCCGUCG |
| SIRNA 1831 | 1831 | GACGGCUCAGAGGCGCCCU | 4855 | AGGGCGCCUCUGAGCCGUC |
| siRNA 1832 | 1832 | ACGGCUCAGAGGCGCCCUG | 4856 | CAGGGCGCCUCUGAGCCGU |
| siRNA 1833 | 1833 | CGGCUCAGAGGCGCCCUGG | 4857 | CCAGGGCGCCUCUGAGCCG |
| siRNA 1834 | 1834 | GGCUCAGAGGCGCCCUGGU | 4858 | ACCAGGGCGCCUCUGAGCC |
| siRNA 1835 | 1835 | GCUCAGAGGCGCCCUGGUG | 4859 | CACCAGGGCGCCUCUGAGC |
| siRNA 1836 | 1836 | CUCAGAGGCGCCCUGGUGC | 4860 | GCACCAGGGCGCCUCUGAG |
| siRNA 1837 | 1837 | UCAGAGGCGCCCUGGUGCU | 4861 | AGCACCAGGGCGCCUCUGA |
| siRNA 1838 | 1838 | CAGAGGCGCCCUGGUGCUU | 4862 | AAGCACCAGGGCGCCUCUG |
| siRNA 1839 | 1839 | AGAGGCGCCCUGGUGCUUC | 4863 | GAAGCACCAGGGCGCCUCU |
| siRNA 1840 | 1840 | GAGGCGCCCUGGUGCUUCA | 4864 | UGAAGCACCAGGGCGCCUC |
| siRNA 1841 | 1841 | AGGCGCCCUGGUGCUUCAC | 4865 | GUGAAGCACCAGGGCGCCU |
| siRNA 1842 | 1842 | GGCGCCCUGGUGCUUCACA | 4866 | UGUGAAGCACCAGGGCGCC |
| siRNA 1843 | 1843 | GCGCCCUGGUGCUUCACAC | 4867 | GUGUGAAGCACCAGGGCGC |
| siRNA 1844 | 1844 | CGCCCUGGUGCUUCACACU | 4868 | AGUGUGAAGCACCAGGGCG |
| siRNA 1845 | 1845 | GCCCUGGUGCUUCACACUG | 4869 | CAGUGUGAAGCACCAGGGC |
| siRNA 1846 | 1846 | CCCUGGUGCUUCACACUGC | 4870 | GCAGUGUGAAGCACCAGGG |
| siRNA 1847 | 1847 | CCUGGUGCUUCACACUGCG | 4871 | CGCAGUGUGAAGCACCAGG |
| siRNA 1848 | 1848 | CUGGUGCUUCACACUGCGG | 4872 | CCGCAGUGUGAAGCACCAG |
| siRNA 1849 | 1849 | UGGUGCUUCACACUGCGGC | 4873 | GCCGCAGUGUGAAGCACCA |
| siRNA 1850 | 1850 | GGUGCUUCACACUGCGGCC | 4874 | GGCCGCAGUGUGAAGCACC |
| siRNA 1851 | 1851 | GUGCUUCACACUGCGGCCC | 4875 | GGGCCGCAGUGUGAAGCAC |
| siRNA 1852 | 1852 | UGCUUCACACUGCGGCCCG | 4876 | CGGGCCGCAGUGUGAAGCA |
| siRNA 1853 | 1853 | GCUUCACACUGCGGCCCGG | 4877 | CCGGGCCGCAGUGUGAAGC |
| siRNA 1854 | 1854 | CUUCACACUGCGGCCCGGC | 4878 | GCCGGGCCGCAGUGUGAAG |
| siRNA 1855 | 1855 | UUCACACUGCGGCCCGGCA | 4879 | UGCCGGGCCGCAGUGUGAA |
| siRNA 1856 | 1856 | UCACACUGCGGCCCGGCAU | 4880 | AUGCCGGGCCGCAGUGUGA |
| siRNA 1857 | 1857 | CACACUGCGGCCCGGCAUG | 4881 | CAUGCCGGGCCGCAGUGUG |
| siRNA 1858 | 1858 | ACACUGCGGCCCGGCAUGC | 4882 | GCAUGCCGGGCCGCAGUGU |
| siRNA 1859 | 1859 | CACUGCGGCCCGGCAUGCG | 4883 | CGCAUGCCGGGCCGCAGUG |
| siRNA 1860 | 1860 | ACUGCGGCCCGGCAUGCGC | 4884 | GCGCAUGCCGGGCCGCAGU |
| siRNA 1861 | 1861 | CUGCGGCCCGGCAUGCGCG | 4885 | CGCGCAUGCCGGGCCGCAG |
| siRNA 1862 | 1862 | UGCGGCCCGGCAUGCGCGC | 4886 | GCGCGCAUGCCGGGCCGCA |
| siRNA 1863 | 1863 | GCGGCCCGGCAUGCGCGCG | 4887 | CGCGCGCAUGCCGGGCCGC |
| siRNA 1864 | 1864 | CGGCCCGGCAUGCGCGCGG | 4888 | CCGCGCGCAUGCCGGGCCG |
| siRNA 1865 | 1865 | GGCCCGGCAUGCGCGCGGC | 4889 | GCCGCGCGCAUGCCGGGCC |
| siRNA 1866 | 1866 | GCCCGGCAUGCGCGCGGCC | 4890 | GGCCGCGCGCAUGCCGGGC |
| siRNA 1867 | 1867 | CCCGGCAUGCGCGCGGCCU | 4891 | AGGCCGCGCGCAUGCCGGG |
| siRNA 1868 | 1868 | CCGGCAUGCGCGCGGCCUU | 4892 | AAGGCCGCGCGCAUGCCGG |
| siRNA 1869 | 1869 | CGGCAUGCGCGCGGCCUUU | 4893 | AAAGGCCGCGCGCAUGCCG |
| siRNA 1870 | 1870 | GGCAUGCGCGCGGCCUUUU | 4894 | AAAAGGCCGCGCGCAUGCC |
| siRNA 1871 | 1871 | GCAUGCGCGCGGCCUUUUG | 4895 | CAAAAGGCCGCGCGCAUGC |
| siRNA 1872 | 1872 | CAUGCGCGCGGCCUUUUGC | 4896 | GCAAAAGGCCGCGCGCAUG |
| siRNA 1873 | 1873 | AUGCGCGCGGCCUUUUGCU | 4897 | AGCAAAAGGCCGCGCGCAU |
| siRNA 1874 | 1874 | UGCGCGCGGCCUUUUGCUA | 4898 | UAGCAAAAGGCCGCGCGCA |
| siRNA 1875 | 1875 | GCGCGCGGCCUUUUGCUAC | 4899 | GUAGCAAAAGGCCGCGCGC |
| siRNA 1876 | 1876 | CGCGCGGCCUUUUGCUACC | 4900 | GGUAGCAAAAGGCCGCGCG |
| siRNA 1877 | 1877 | GCGCGGCCUUUUGCUACCA | 4901 | UGGUAGCAAAAGGCCGCGC |
| siRNA 1878 | 1878 | CGCGGCCUUUUGCUACCAG | 4902 | CUGGUAGCAAAAGGCCGCG |
| siRNA 1879 | 1879 | GCGGCCUUUUGCUACCAGA | 4903 | UCUGGUAGCAAAAGGCCGC |
| siRNA 1880 | 1880 | CGGCCUUUUGCUACCAGAU | 4904 | AUCUGGUAGCAAAAGGCCG |
| siRNA 1881 | 1881 | GGCCUUUUGCUACCAGAUC | 4905 | GAUCUGGUAGCAAAAGGCC |
| siRNA 1882 | 1882 | GCCUUUUGCUACCAGAUCC | 4906 | GGAUCUGGUAGCAAAAGGC |
| SIRNA 1883 | 1883 | CCUUUUGCUACCAGAUCCG | 4907 | CGGAUCUGGUAGCAAAAGG |
| siRNA 1884 | 1884 | CUUUUGCUACCAGAUCCGG | 4908 | CCGGAUCUGGUAGCAAAAG |
| siRNA 1885 | 1885 | UUUUGCUACCAGAUCCGGC | 4909 | GCCGGAUCUGGUAGCAAAA |
| siRNA 1886 | 1886 | UUUGCUACCAGAUCCGGCG | 4910 | CGCCGGAUCUGGUAGCAAA |
| siRNA 1887 | 1887 | UUGCUACCAGAUCCGGCGU | 4911 | ACGCCGGAUCUGGUAGCAA |
| siRNA 1888 | 1888 | UGCUACCAGAUCCGGCGUU | 4912 | AACGCCGGAUCUGGUAGCA |
| siRNA 1889 | 1889 | GCUACCAGAUCCGGCGUUG | 4913 | CAACGCCGGAUCUGGUAGC |
| siRNA 1890 | 1890 | CUACCAGAUCCGGCGUUGU | 4914 | ACAACGCCGGAUCUGGUAG |
| siRNA 1891 | 1891 | UACCAGAUCCGGCGUUGUA | 4915 | UACAACGCCGGAUCUGGUA |
| siRNA 1892 | 1892 | ACCAGAUCCGGCGUUGUAC | 4916 | GUACAACGCCGGAUCUGGU |
| siRNA 1893 | 1893 | CCAGAUCCGGCGUUGUACA | 4917 | UGUACAACGCCGGAUCUGG |
| siRNA 1894 | 1894 | CAGAUCCGGCGUUGUACAG | 4918 | CUGUACAACGCCGGAUCUG |
| siRNA 1895 | 1895 | AGAUCCGGCGUUGUACAGA | 4919 | UCUGUACAACGCCGGAUCU |
| siRNA 1896 | 1896 | GAUCCGGCGUUGUACAGAC | 4920 | GUCUGUACAACGCCGGAUC |
| siRNA 1897 | 1897 | AUCCGGCGUUGUACAGACG | 4921 | CGUCUGUACAACGCCGGAU |
| siRNA 1898 | 1898 | UCCGGCGUUGUACAGACGA | 4922 | UCGUCUGUACAACGCCGGA |
| siRNA 1899 | 1899 | CCGGCGUUGUACAGACGAC | 4923 | GUCGUCUGUACAACGCCGG |
| siRNA 1900 | 1900 | CGGCGUUGUACAGACGACG | 4924 | CGUCGUCUGUACAACGCCG |
| siRNA 1901 | 1901 | GGCGUUGUACAGACGACGU | 4925 | ACGUCGUCUGUACAACGCC |
| siRNA 1902 | 1902 | GCGUUGUACAGACGACGUG | 4926 | CACGUCGUCUGUACAACGC |
| SIRNA 1903 | 1903 | CGUUGUACAGACGACGUGC | 4927 | GCACGUCGUCUGUACAACG |
| siRNA 1904 | 1904 | GUUGUACAGACGACGUGCG | 4928 | CGCACGUCGUCUGUACAAC |
| siRNA 1905 | 1905 | UUGUACAGACGACGUGCGG | 4929 | CCGCACGUCGUCUGUACAA |
| siRNA 1906 | 1906 | UGUACAGACGACGUGCGGC | 4930 | GCCGCACGUCGUCUGUACA |
| siRNA 1907 | 1907 | GUACAGACGACGUGCGGCC | 4931 | GGCCGCACGUCGUCUGUAC |
| siRNA 1908 | 1908 | UACAGACGACGUGCGGCCC | 4932 | GGGCCGCACGUCGUCUGUA |
| siRNA 1909 | 1909 | ACAGACGACGUGCGGCCCC | 4933 | GGGGCCGCACGUCGUCUGU |
| siRNA 1910 | 1910 | CAGACGACGUGCGGCCCCA | 4934 | UGGGGCCGCACGUCGUCUG |
| siRNA 1911 | 1911 | AGACGACGUGCGGCCCCAG | 4935 | CUGGGGCCGCACGUCGUCU |
| siRNA 1912 | 1912 | GACGACGUGCGGCCCCAGG | 4936 | CCUGGGGCCGCACGUCGUC |
| siRNA 1913 | 1913 | ACGACGUGCGGCCCCAGGA | 4937 | UCCUGGGGCCGCACGUCGU |
| siRNA 1914 | 1914 | CGACGUGCGGCCCCAGGAC | 4938 | GUCCUGGGGCCGCACGUCG |
| siRNA 1915 | 1915 | GACGUGCGGCCCCAGGACU | 4939 | AGUCCUGGGGCCGCACGUC |
| siRNA 1916 | 1916 | ACGUGCGGCCCCAGGACUG | 4940 | CAGUCCUGGGGCCGCACGU |
| siRNA 1917 | 1917 | CGUGCGGCCCCAGGACUGC | 4941 | GCAGUCCUGGGGCCGCACG |
| siRNA 1918 | 1918 | GUGCGGCCCCAGGACUGCU | 4942 | AGCAGUCCUGGGGCCGCAC |
| siRNA 1919 | 1919 | UGCGGCCCCAGGACUGCUA | 4943 | UAGCAGUCCUGGGGCCGCA |
| siRNA 1920 | 1920 | GCGGCCCCAGGACUGCUAC | 4944 | GUAGCAGUCCUGGGGCCGC |
| siRNA 1921 | 1921 | CGGCCCCAGGACUGCUACC | 4945 | GGUAGCAGUCCUGGGGCCG |
| siRNA 1922 | 1922 | GGCCCCAGGACUGCUACCA | 4946 | UGGUAGCAGUCCUGGGGCC |
| siRNA 1923 | 1923 | GCCCCAGGACUGCUACCAC | 4947 | GUGGUAGCAGUCCUGGGGC |
| siRNA 1924 | 1924 | CCCCAGGACUGCUACCACG | 4948 | CGUGGUAGCAGUCCUGGGG |
| siRNA 1925 | 1925 | CCCAGGACUGCUACCACGG | 4949 | CCGUGGUAGCAGUCCUGGG |
| siRNA 1926 | 1926 | CCAGGACUGCUACCACGGC | 4950 | GCCGUGGUAGCAGUCCUGG |
| siRNA 1927 | 1927 | CAGGACUGCUACCACGGCG | 4951 | CGCCGUGGUAGCAGUCCUG |
| siRNA 1928 | 1928 | AGGACUGCUACCACGGCGC | 4952 | GCGCCGUGGUAGCAGUCCU |
| siRNA 1929 | 1929 | GGACUGCUACCACGGCGCA | 4953 | UGCGCCGUGGUAGCAGUCC |
| siRNA 1930 | 1930 | GACUGCUACCACGGCGCAG | 4954 | CUGCGCCGUGGUAGCAGUC |
| siRNA 1931 | 1931 | ACUGCUACCACGGCGCAGG | 4955 | CCUGCGCCGUGGUAGCAGU |
| siRNA 1932 | 1932 | CUGCUACCACGGCGCAGGG | 4956 | CCCUGCGCCGUGGUAGCAG |
| siRNA 1933 | 1933 | UGCUACCACGGCGCAGGGG | 4957 | CCCCUGCGCCGUGGUAGCA |
| siRNA 1934 | 1934 | GCUACCACGGCGCAGGGGA | 4958 | UCCCCUGCGCCGUGGUAGC |
| siRNA 1935 | 1935 | CUACCACGGCGCAGGGGAG | 4959 | CUCCCCUGCGCCGUGGUAG |
| siRNA 1936 | 1936 | UACCACGGCGCAGGGGAGC | 4960 | GCUCCCCUGCGCCGUGGUA |
| siRNA 1937 | 1937 | ACCACGGCGCAGGGGAGCA | 4961 | UGCUCCCCUGCGCCGUGGU |
| siRNA 1938 | 1938 | CCACGGCGCAGGGGAGCAG | 4962 | CUGCUCCCCUGCGCCGUGG |
| siRNA 1939 | 1939 | CACGGCGCAGGGGAGCAGU | 4963 | ACUGCUCCCCUGCGCCGUG |
| siRNA 1940 | 1940 | ACGGCGCAGGGGAGCAGUA | 4964 | UACUGCUCCCCUGCGCCGU |
| siRNA 1941 | 1941 | CGGCGCAGGGGAGCAGUAC | 4965 | GUACUGCUCCCCUGCGCCG |
| siRNA 1942 | 1942 | GGCGCAGGGGAGCAGUACC | 4966 | GGUACUGCUCCCCUGCGCC |
| siRNA 1943 | 1943 | GCGCAGGGGAGCAGUACCG | 4967 | CGGUACUGCUCCCCUGCGC |
| siRNA 1944 | 1944 | CGCAGGGGAGCAGUACCGC | 4968 | GCGGUACUGCUCCCCUGCG |
| siRNA 1945 | 1945 | GCAGGGGAGCAGUACCGCG | 4969 | CGCGGUACUGCUCCCCUGC |
| siRNA 1946 | 1946 | CAGGGGAGCAGUACCGCGG | 4970 | CCGCGGUACUGCUCCCCUG |
| siRNA 1947 | 1947 | AGGGGAGCAGUACCGCGGC | 4971 | GCCGCGGUACUGCUCCCCU |
| siRNA 1948 | 1948 | GGGGAGCAGUACCGCGGCA | 4972 | UGCCGCGGUACUGCUCCCC |
| siRNA 1949 | 1949 | GGGAGCAGUACCGCGGCAC | 4973 | GUGCCGCGGUACUGCUCCC |
| siRNA 1950 | 1950 | GGAGCAGUACCGCGGCACG | 4974 | CGUGCCGCGGUACUGCUCC |
| siRNA 1951 | 1951 | GAGCAGUACCGCGGCACGG | 4975 | CCGUGCCGCGGUACUGCUC |
| siRNA 1952 | 1952 | AGCAGUACCGCGGCACGGU | 4976 | ACCGUGCCGCGGUACUGCU |
| siRNA 1953 | 1953 | GCAGUACCGCGGCACGGUC | 4977 | GACCGUGCCGCGGUACUGC |
| siRNA 1954 | 1954 | CAGUACCGCGGCACGGUCA | 4978 | UGACCGUGCCGCGGUACUG |
| siRNA 1955 | 1955 | AGUACCGCGGCACGGUCAG | 4979 | CUGACCGUGCCGCGGUACU |
| siRNA 1956 | 1956 | GUACCGCGGCACGGUCAGC | 4980 | GCUGACCGUGCCGCGGUAC |
| siRNA 1957 | 1957 | UACCGCGGCACGGUCAGCA | 4981 | UGCUGACCGUGCCGCGGUA |
| siRNA 1958 | 1958 | ACCGCGGCACGGUCAGCAA | 4982 | UUGCUGACCGUGCCGCGGU |
| siRNA 1959 | 1959 | CCGCGGCACGGUCAGCAAG | 4983 | CUUGCUGACCGUGCCGCGG |
| siRNA 1960 | 1960 | CGCGGCACGGUCAGCAAGA | 4984 | UCUUGCUGACCGUGCCGCG |
| siRNA 1961 | 1961 | GCGGCACGGUCAGCAAGAC | 4985 | GUCUUGCUGACCGUGCCGC |
| siRNA 1962 | 1962 | CGGCACGGUCAGCAAGACC | 4986 | GGUCUUGCUGACCGUGCCG |
| siRNA 1963 | 1963 | GGCACGGUCAGCAAGACCC | 4987 | GGGUCUUGCUGACCGUGCC |
| siRNA 1964 | 1964 | GCACGGUCAGCAAGACCCG | 4988 | CGGGUCUUGCUGACCGUGC |
| siRNA 1965 | 1965 | CACGGUCAGCAAGACCCGC | 4989 | GCGGGUCUUGCUGACCGUG |
| siRNA 1966 | 1966 | ACGGUCAGCAAGACCCGCA | 4990 | UGCGGGUCUUGCUGACCGU |
| siRNA 1967 | 1967 | CGGUCAGCAAGACCCGCAA | 4991 | UUGCGGGUCUUGCUGACCG |
| siRNA 1968 | 1968 | GGUCAGCAAGACCCGCAAG | 4992 | CUUGCGGGUCUUGCUGACC |
| siRNA 1969 | 1969 | GUCAGCAAGACCCGCAAGG | 4993 | CCUUGCGGGUCUUGCUGAC |
| siRNA 1970 | 1970 | UCAGCAAGACCCGCAAGGG | 4994 | CCCUUGCGGGUCUUGCUGA |
| siRNA 1971 | 1971 | CAGCAAGACCCGCAAGGGU | 4995 | ACCCUUGCGGGUCUUGCUG |
| siRNA 1972 | 1972 | AGCAAGACCCGCAAGGGUG | 4996 | CACCCUUGCGGGUCUUGCU |
| siRNA 1973 | 1973 | GCAAGACCCGCAAGGGUGU | 4997 | ACACCCUUGCGGGUCUUGC |
| siRNA 1974 | 1974 | CAAGACCCGCAAGGGUGUC | 4998 | GACACCCUUGCGGGUCUUG |
| siRNA 1975 | 1975 | AAGACCCGCAAGGGUGUCC | 4999 | GGACACCCUUGCGGGUCUU |
| siRNA 1976 | 1976 | AGACCCGCAAGGGUGUCCA | 5000 | UGGACACCCUUGCGGGUCU |
| siRNA 1977 | 1977 | GACCCGCAAGGGUGUCCAG | 5001 | CUGGACACCCUUGCGGGUC |
| siRNA 1978 | 1978 | ACCCGCAAGGGUGUCCAGU | 5002 | ACUGGACACCCUUGCGGGU |
| siRNA 1979 | 1979 | CCCGCAAGGGUGUCCAGUG | 5003 | CACUGGACACCCUUGCGGG |
| siRNA 1980 | 1980 | CCGCAAGGGUGUCCAGUGC | 5004 | GCACUGGACACCCUUGCGG |
| siRNA 1981 | 1981 | CGCAAGGGUGUCCAGUGCC | 5005 | GGCACUGGACACCCUUGCG |
| siRNA 1982 | 1982 | GCAAGGGUGUCCAGUGCCA | 5006 | UGGCACUGGACACCCUUGC |
| siRNA 1983 | 1983 | CAAGGGUGUCCAGUGCCAG | 5007 | CUGGCACUGGACACCCUUG |
| siRNA 1984 | 1984 | AAGGGUGUCCAGUGCCAGC | 5008 | GCUGGCACUGGACACCCUU |
| siRNA 1985 | 1985 | AGGGUGUCCAGUGCCAGCG | 5009 | CGCUGGCACUGGACACCCU |
| siRNA 1986 | 1986 | GGGUGUCCAGUGCCAGCGC | 5010 | GCGCUGGCACUGGACACCC |
| siRNA 1987 | 1987 | GGUGUCCAGUGCCAGCGCU | 5011 | AGCGCUGGCACUGGACACC |
| siRNA 1988 | 1988 | GUGUCCAGUGCCAGCGCUG | 5012 | CAGCGCUGGCACUGGACAC |
| siRNA 1989 | 1989 | UGUCCAGUGCCAGCGCUGG | 5013 | CCAGCGCUGGCACUGGACA |
| siRNA 1990 | 1990 | GUCCAGUGCCAGCGCUGGU | 5014 | ACCAGCGCUGGCACUGGAC |
| siRNA 1991 | 1991 | UCCAGUGCCAGCGCUGGUC | 5015 | GACCAGCGCUGGCACUGGA |
| siRNA 1992 | 1992 | CCAGUGCCAGCGCUGGUCC | 5016 | GGACCAGCGCUGGCACUGG |
| siRNA 1993 | 1993 | CAGUGCCAGCGCUGGUCCG | 5017 | CGGACCAGCGCUGGCACUG |
| siRNA 1994 | 1994 | AGUGCCAGCGCUGGUCCGC | 5018 | GCGGACCAGCGCUGGCACU |
| siRNA 1995 | 1995 | GUGCCAGCGCUGGUCCGCU | 5019 | AGCGGACCAGCGCUGGCAC |
| siRNA 1996 | 1996 | UGCCAGCGCUGGUCCGCUG | 5020 | CAGCGGACCAGCGCUGGCA |
| siRNA 1997 | 1997 | GCCAGCGCUGGUCCGCUGA | 5021 | UCAGCGGACCAGCGCUGGC |
| siRNA 1998 | 1998 | CCAGCGCUGGUCCGCUGAG | 5022 | CUCAGCGGACCAGCGCUGG |
| siRNA 1999 | 1999 | CAGCGCUGGUCCGCUGAGA | 5023 | UCUCAGCGGACCAGCGCUG |
| siRNA 2000 | 2000 | AGCGCUGGUCCGCUGAGAC | 5024 | GUCUCAGCGGACCAGCGCU |
| siRNA 2001 | 2001 | GCGCUGGUCCGCUGAGACG | 5025 | CGUCUCAGCGGACCAGCGC |
| siRNA 2002 | 2002 | CGCUGGUCCGCUGAGACGC | 5026 | GCGUCUCAGCGGACCAGCG |
| siRNA 2003 | 2003 | GCUGGUCCGCUGAGACGCC | 5027 | GGCGUCUCAGCGGACCAGC |
| siRNA 2004 | 2004 | CUGGUCCGCUGAGACGCCG | 5028 | CGGCGUCUCAGCGGACCAG |
| siRNA 2005 | 2005 | UGGUCCGCUGAGACGCCGC | 5029 | GCGGCGUCUCAGCGGACCA |
| siRNA 2006 | 2006 | GGUCCGCUGAGACGCCGCA | 5030 | UGCGGCGUCUCAGCGGACC |
| siRNA 2007 | 2007 | GUCCGCUGAGACGCCGCAC | 5031 | GUGCGGCGUCUCAGCGGAC |
| siRNA 2008 | 2008 | UCCGCUGAGACGCCGCACA | 5032 | UGUGCGGCGUCUCAGCGGA |
| siRNA 2009 | 2009 | CCGCUGAGACGCCGCACAA | 5033 | UUGUGCGGCGUCUCAGCGG |
| siRNA 2010 | 2010 | CGCUGAGACGCCGCACAAG | 5034 | CUUGUGCGGCGUCUCAGCG |
| siRNA 2011 | 2011 | GCUGAGACGCCGCACAAGC | 5035 | GCUUGUGCGGCGUCUCAGC |
| siRNA 2012 | 2012 | CUGAGACGCCGCACAAGCC | 5036 | GGCUUGUGCGGCGUCUCAG |
| siRNA 2013 | 2013 | UGAGACGCCGCACAAGCCG | 5037 | CGGCUUGUGCGGCGUCUCA |
| siRNA 2014 | 2014 | GAGACGCCGCACAAGCCGC | 5038 | GCGGCUUGUGCGGCGUCUC |
| siRNA 2015 | 2015 | AGACGCCGCACAAGCCGCA | 5039 | UGCGGCUUGUGCGGCGUCU |
| siRNA 2016 | 2016 | GACGCCGCACAAGCCGCAG | 5040 | CUGCGGCUUGUGCGGCGUC |
| siRNA 2017 | 2017 | ACGCCGCACAAGCCGCAGU | 5041 | ACUGCGGCUUGUGCGGCGU |
| siRNA 2018 | 2018 | CGCCGCACAAGCCGCAGUU | 5042 | AACUGCGGCUUGUGCGGCG |
| siRNA 2019 | 2019 | GCCGCACAAGCCGCAGUUC | 5043 | GAACUGCGGCUUGUGCGGC |
| siRNA 2020 | 2020 | CCGCACAAGCCGCAGUUCA | 5044 | UGAACUGCGGCUUGUGCGG |
| siRNA 2021 | 2021 | CGCACAAGCCGCAGUUCAC | 5045 | GUGAACUGCGGCUUGUGCG |
| siRNA 2022 | 2022 | GCACAAGCCGCAGUUCACG | 5046 | CGUGAACUGCGGCUUGUGC |
| siRNA 2023 | 2023 | CACAAGCCGCAGUUCACGU | 5047 | ACGUGAACUGCGGCUUGUG |
| siRNA 2024 | 2024 | ACAAGCCGCAGUUCACGUU | 5048 | AACGUGAACUGCGGCUUGU |
| siRNA 2025 | 2025 | CAAGCCGCAGUUCACGUUU | 5049 | AAACGUGAACUGCGGCUUG |
| siRNA 2026 | 2026 | AAGCCGCAGUUCACGUUUA | 5050 | UAAACGUGAACUGCGGCUU |
| siRNA 2027 | 2027 | AGCCGCAGUUCACGUUUAC | 5051 | GUAAACGUGAACUGCGGCU |
| siRNA 2028 | 2028 | GCCGCAGUUCACGUUUACC | 5052 | GGUAAACGUGAACUGCGGC |
| siRNA 2029 | 2029 | CCGCAGUUCACGUUUACCU | 5053 | AGGUAAACGUGAACUGCGG |
| siRNA 2030 | 2030 | CGCAGUUCACGUUUACCUC | 5054 | GAGGUAAACGUGAACUGCG |
| siRNA 2031 | 2031 | GCAGUUCACGUUUACCUCC | 5055 | GGAGGUAAACGUGAACUGC |
| siRNA 2032 | 2032 | CAGUUCACGUUUACCUCCG | 5056 | CGGAGGUAAACGUGAACUG |
| siRNA 2033 | 2033 | AGUUCACGUUUACCUCCGA | 5057 | UCGGAGGUAAACGUGAACU |
| siRNA 2034 | 2034 | GUUCACGUUUACCUCCGAA | 5058 | UUCGGAGGUAAACGUGAAC |
| siRNA 2035 | 2035 | UUCACGUUUACCUCCGAAC | 5059 | GUUCGGAGGUAAACGUGAA |
| siRNA 2036 | 2036 | UCACGUUUACCUCCGAACC | 5060 | GGUUCGGAGGUAAACGUGA |
| siRNA 2037 | 2037 | CACGUUUACCUCCGAACCG | 5061 | CGGUUCGGAGGUAAACGUG |
| siRNA 2038 | 2038 | ACGUUUACCUCCGAACCGC | 5062 | GCGGUUCGGAGGUAAACGU |
| siRNA 2039 | 2039 | CGUUUACCUCCGAACCGCA | 5063 | UGCGGUUCGGAGGUAAACG |
| siRNA 2040 | 2040 | GUUUACCUCCGAACCGCAU | 5064 | AUGCGGUUCGGAGGUAAAC |
| siRNA 2041 | 2041 | UUUACCUCCGAACCGCAUG | 5065 | CAUGCGGUUCGGAGGUAAA |
| siRNA 2042 | 2042 | UUACCUCCGAACCGCAUGC | 5066 | GCAUGCGGUUCGGAGGUAA |
| siRNA 2043 | 2043 | UACCUCCGAACCGCAUGCA | 5067 | UGCAUGCGGUUCGGAGGUA |
| siRNA 2044 | 2044 | ACCUCCGAACCGCAUGCAC | 5068 | GUGCAUGCGGUUCGGAGGU |
| siRNA 2045 | 2045 | CCUCCGAACCGCAUGCACA | 5069 | UGUGCAUGCGGUUCGGAGG |
| siRNA 2046 | 2046 | CUCCGAACCGCAUGCACAA | 5070 | UUGUGCAUGCGGUUCGGAG |
| siRNA 2047 | 2047 | UCCGAACCGCAUGCACAAC | 5071 | GUUGUGCAUGCGGUUCGGA |
| siRNA 2048 | 2048 | CCGAACCGCAUGCACAACU | 5072 | AGUUGUGCAUGCGGUUCGG |
| siRNA 2049 | 2049 | CGAACCGCAUGCACAACUG | 5073 | CAGUUGUGCAUGCGGUUCG |
| siRNA 2050 | 2050 | GAACCGCAUGCACAACUGG | 5074 | CCAGUUGUGCAUGCGGUUC |
| siRNA 2051 | 2051 | AACCGCAUGCACAACUGGA | 5075 | UCCAGUUGUGCAUGCGGUU |
| siRNA 2052 | 2052 | ACCGCAUGCACAACUGGAG | 5076 | CUCCAGUUGUGCAUGCGGU |
| siRNA 2053 | 2053 | CCGCAUGCACAACUGGAGG | 5077 | CCUCCAGUUGUGCAUGCGG |
| siRNA 2054 | 2054 | CGCAUGCACAACUGGAGGA | 5078 | UCCUCCAGUUGUGCAUGCG |
| siRNA 2055 | 2055 | GCAUGCACAACUGGAGGAG | 5079 | CUCCUCCAGUUGUGCAUGC |
| siRNA 2056 | 2056 | CAUGCACAACUGGAGGAGA | 5080 | UCUCCUCCAGUUGUGCAUG |
| siRNA 2057 | 2057 | AUGCACAACUGGAGGAGAA | 5081 | UUCUCCUCCAGUUGUGCAU |
| siRNA 2058 | 2058 | UGCACAACUGGAGGAGAAC | 5082 | GUUCUCCUCCAGUUGUGCA |
| siRNA 2059 | 2059 | GCACAACUGGAGGAGAACU | 5083 | AGUUCUCCUCCAGUUGUGC |
| siRNA 2060 | 2060 | CACAACUGGAGGAGAACUU | 5084 | AAGUUCUCCUCCAGUUGUG |
| siRNA 2061 | 2061 | ACAACUGGAGGAGAACUUC | 5085 | GAAGUUCUCCUCCAGUUGU |
| siRNA 2062 | 2062 | CAACUGGAGGAGAACUUCU | 5086 | AGAAGUUCUCCUCCAGUUG |
| siRNA 2063 | 2063 | AACUGGAGGAGAACUUCUG | 5087 | CAGAAGUUCUCCUCCAGUU |
| siRNA 2064 | 2064 | ACUGGAGGAGAACUUCUGC | 5088 | GCAGAAGUUCUCCUCCAGU |
| siRNA 2065 | 2065 | CUGGAGGAGAACUUCUGCC | 5089 | GGCAGAAGUUCUCCUCCAG |
| siRNA 2066 | 2066 | UGGAGGAGAACUUCUGCCG | 5090 | CGGCAGAAGUUCUCCUCCA |
| siRNA 2067 | 2067 | GGAGGAGAACUUCUGCCGG | 5091 | CCGGCAGAAGUUCUCCUCC |
| siRNA 2068 | 2068 | GAGGAGAACUUCUGCCGGA | 5092 | UCCGGCAGAAGUUCUCCUC |
| siRNA 2069 | 2069 | AGGAGAACUUCUGCCGGAA | 5093 | UUCCGGCAGAAGUUCUCCU |
| siRNA 2070 | 2070 | GGAGAACUUCUGCCGGAAC | 5094 | GUUCCGGCAGAAGUUCUCC |
| siRNA 2071 | 2071 | GAGAACUUCUGCCGGAACC | 5095 | GGUUCCGGCAGAAGUUCUC |
| siRNA 2072 | 2072 | AGAACUUCUGCCGGAACCC | 5096 | GGGUUCCGGCAGAAGUUCU |
| siRNA 2073 | 2073 | GAACUUCUGCCGGAACCCA | 5097 | UGGGUUCCGGCAGAAGUUC |
| siRNA 2074 | 2074 | AACUUCUGCCGGAACCCAG | 5098 | CUGGGUUCCGGCAGAAGUU |
| siRNA 2075 | 2075 | ACUUCUGCCGGAACCCAGA | 5099 | UCUGGGUUCCGGCAGAAGU |
| siRNA 2076 | 2076 | CUUCUGCCGGAACCCAGAU | 5100 | AUCUGGGUUCCGGCAGAAG |
| siRNA 2077 | 2077 | UUCUGCCGGAACCCAGAUG | 5101 | CAUCUGGGUUCCGGCAGAA |
| siRNA 2078 | 2078 | UCUGCCGGAACCCAGAUGG | 5102 | CCAUCUGGGUUCCGGCAGA |
| siRNA 2079 | 2079 | CUGCCGGAACCCAGAUGGG | 5103 | CCCAUCUGGGUUCCGGCAG |
| siRNA 2080 | 2080 | UGCCGGAACCCAGAUGGGG | 5104 | CCCCAUCUGGGUUCCGGCA |
| siRNA 2081 | 2081 | GCCGGAACCCAGAUGGGGA | 5105 | UCCCCAUCUGGGUUCCGGC |
| siRNA 2082 | 2082 | CCGGAACCCAGAUGGGGAU | 5106 | AUCCCCAUCUGGGUUCCGG |
| siRNA 2083 | 2083 | CGGAACCCAGAUGGGGAUA | 5107 | UAUCCCCAUCUGGGUUCCG |
| siRNA 2084 | 2084 | GGAACCCAGAUGGGGAUAG | 5108 | CUAUCCCCAUCUGGGUUCC |
| siRNA 2085 | 2085 | GAACCCAGAUGGGGAUAGC | 5109 | GCUAUCCCCAUCUGGGUUC |
| siRNA 2086 | 2086 | AACCCAGAUGGGGAUAGCC | 5110 | GGCUAUCCCCAUCUGGGUU |
| siRNA 2087 | 2087 | ACCCAGAUGGGGAUAGCCA | 5111 | UGGCUAUCCCCAUCUGGGU |
| siRNA 2088 | 2088 | CCCAGAUGGGGAUAGCCAU | 5112 | AUGGCUAUCCCCAUCUGGG |
| siRNA 2089 | 2089 | CCAGAUGGGGAUAGCCAUG | 5113 | CAUGGCUAUCCCCAUCUGG |
| siRNA 2090 | 2090 | CAGAUGGGGAUAGCCAUGG | 5114 | CCAUGGCUAUCCCCAUCUG |
| siRNA 2091 | 2091 | AGAUGGGGAUAGCCAUGGG | 5115 | CCCAUGGCUAUCCCCAUCU |
| siRNA 2092 | 2092 | GAUGGGGAUAGCCAUGGGC | 5116 | GCCCAUGGCUAUCCCCAUC |
| siRNA 2093 | 2093 | AUGGGGAUAGCCAUGGGCC | 5117 | GGCCCAUGGCUAUCCCCAU |
| siRNA 2094 | 2094 | UGGGGAUAGCCAUGGGCCC | 5118 | GGGCCCAUGGCUAUCCCCA |
| siRNA 2095 | 2095 | GGGGAUAGCCAUGGGCCCU | 5119 | AGGGCCCAUGGCUAUCCCC |
| siRNA 2096 | 2096 | GGGAUAGCCAUGGGCCCUG | 5120 | CAGGGCCCAUGGCUAUCCC |
| siRNA 2097 | 2097 | GGAUAGCCAUGGGCCCUGG | 5121 | CCAGGGCCCAUGGCUAUCC |
| siRNA 2098 | 2098 | GAUAGCCAUGGGCCCUGGU | 5122 | ACCAGGGCCCAUGGCUAUC |
| siRNA 2099 | 2099 | AUAGCCAUGGGCCCUGGUG | 5123 | CACCAGGGCCCAUGGCUAU |
| siRNA 2100 | 2100 | UAGCCAUGGGCCCUGGUGC | 5124 | GCACCAGGGCCCAUGGCUA |
| siRNA 2101 | 2101 | AGCCAUGGGCCCUGGUGCU | 5125 | AGCACCAGGGCCCAUGGCU |
| siRNA 2102 | 2102 | GCCAUGGGCCCUGGUGCUA | 5126 | UAGCACCAGGGCCCAUGGC |
| siRNA 2103 | 2103 | CCAUGGGCCCUGGUGCUAC | 5127 | GUAGCACCAGGGCCCAUGG |
| siRNA 2104 | 2104 | CAUGGGCCCUGGUGCUACA | 5128 | UGUAGCACCAGGGCCCAUG |
| siRNA 2105 | 2105 | AUGGGCCCUGGUGCUACAC | 5129 | GUGUAGCACCAGGGCCCAU |
| siRNA 2106 | 2106 | UGGGCCCUGGUGCUACACG | 5130 | CGUGUAGCACCAGGGCCCA |
| siRNA 2107 | 2107 | GGGCCCUGGUGCUACACGA | 5131 | UCGUGUAGCACCAGGGCCC |
| siRNA 2108 | 2108 | GGCCCUGGUGCUACACGAU | 5132 | AUCGUGUAGCACCAGGGCC |
| siRNA 2109 | 2109 | GCCCUGGUGCUACACGAUG | 5133 | CAUCGUGUAGCACCAGGGC |
| siRNA 2110 | 2110 | CCCUGGUGCUACACGAUGG | 5134 | CCAUCGUGUAGCACCAGGG |
| siRNA 2111 | 2111 | CCUGGUGCUACACGAUGGA | 5135 | UCCAUCGUGUAGCACCAGG |
| siRNA 2112 | 2112 | CUGGUGCUACACGAUGGAC | 5136 | GUCCAUCGUGUAGCACCAG |
| siRNA 2113 | 2113 | UGGUGCUACACGAUGGACC | 5137 | GGUCCAUCGUGUAGCACCA |
| siRNA 2114 | 2114 | GGUGCUACACGAUGGACCC | 5138 | GGGUCCAUCGUGUAGCACC |
| siRNA 2115 | 2115 | GUGCUACACGAUGGACCCA | 5139 | UGGGUCCAUCGUGUAGCAC |
| siRNA 2116 | 2116 | UGCUACACGAUGGACCCAA | 5140 | UUGGGUCCAUCGUGUAGCA |
| siRNA 2117 | 2117 | GCUACACGAUGGACCCAAG | 5141 | CUUGGGUCCAUCGUGUAGC |
| siRNA 2118 | 2118 | CUACACGAUGGACCCAAGG | 5142 | CCUUGGGUCCAUCGUGUAG |
| siRNA 2119 | 2119 | UACACGAUGGACCCAAGGA | 5143 | UCCUUGGGUCCAUCGUGUA |
| siRNA 2120 | 2120 | ACACGAUGGACCCAAGGAC | 5144 | GUCCUUGGGUCCAUCGUGU |
| siRNA 2121 | 2121 | CACGAUGGACCCAAGGACC | 5145 | GGUCCUUGGGUCCAUCGUG |
| siRNA 2122 | 2122 | ACGAUGGACCCAAGGACCC | 5146 | GGGUCCUUGGGUCCAUCGU |
| siRNA 2123 | 2123 | CGAUGGACCCAAGGACCCC | 5147 | GGGGUCCUUGGGUCCAUCG |
| siRNA 2124 | 2124 | GAUGGACCCAAGGACCCCA | 5148 | UGGGGUCCUUGGGUCCAUC |
| siRNA 2125 | 2125 | AUGGACCCAAGGACCCCAU | 5149 | AUGGGGUCCUUGGGUCCAU |
| siRNA 2126 | 2126 | UGGACCCAAGGACCCCAUU | 5150 | AAUGGGGUCCUUGGGUCCA |
| siRNA 2127 | 2127 | GGACCCAAGGACCCCAUUC | 5151 | GAAUGGGGUCCUUGGGUCC |
| siRNA 2128 | 2128 | GACCCAAGGACCCCAUUCG | 5152 | CGAAUGGGGUCCUUGGGUC |
| siRNA 2129 | 2129 | ACCCAAGGACCCCAUUCGA | 5153 | UCGAAUGGGGUCCUUGGGU |
| siRNA 2130 | 2130 | CCCAAGGACCCCAUUCGAC | 5154 | GUCGAAUGGGGUCCUUGGG |
| siRNA 2131 | 2131 | CCAAGGACCCCAUUCGACU | 5155 | AGUCGAAUGGGGUCCUUGG |
| siRNA 2132 | 2132 | CAAGGACCCCAUUCGACUA | 5156 | UAGUCGAAUGGGGUCCUUG |
| siRNA 2133 | 2133 | AAGGACCCCAUUCGACUAC | 5157 | GUAGUCGAAUGGGGUCCUU |
| siRNA 2134 | 2134 | AGGACCCCAUUCGACUACU | 5158 | AGUAGUCGAAUGGGGUCCU |
| siRNA 2135 | 2135 | GGACCCCAUUCGACUACUG | 5159 | CAGUAGUCGAAUGGGGUCC |
| siRNA 2136 | 2136 | GACCCCAUUCGACUACUGU | 5160 | ACAGUAGUCGAAUGGGGUC |
| siRNA 2137 | 2137 | ACCCCAUUCGACUACUGUG | 5161 | CACAGUAGUCGAAUGGGGU |
| siRNA 2138 | 2138 | CCCCAUUCGACUACUGUGC | 5162 | GCACAGUAGUCGAAUGGGG |
| siRNA 2139 | 2139 | CCCAUUCGACUACUGUGCC | 5163 | GGCACAGUAGUCGAAUGGG |
| siRNA 2140 | 2140 | CCAUUCGACUACUGUGCCC | 5164 | GGGCACAGUAGUCGAAUGG |
| siRNA 2141 | 2141 | CAUUCGACUACUGUGCCCU | 5165 | AGGGCACAGUAGUCGAAUG |
| siRNA 2142 | 2142 | AUUCGACUACUGUGCCCUG | 5166 | CAGGGCACAGUAGUCGAAU |
| siRNA 2143 | 2143 | UUCGACUACUGUGCCCUGC | 5167 | GCAGGGCACAGUAGUCGAA |
| siRNA 2144 | 2144 | UCGACUACUGUGCCCUGCG | 5168 | CGCAGGGCACAGUAGUCGA |
| siRNA 2145 | 2145 | CGACUACUGUGCCCUGCGA | 5169 | UCGCAGGGCACAGUAGUCG |
| siRNA 2146 | 2146 | GACUACUGUGCCCUGCGAC | 5170 | GUCGCAGGGCACAGUAGUC |
| siRNA 2147 | 2147 | ACUACUGUGCCCUGCGACG | 5171 | CGUCGCAGGGCACAGUAGU |
| siRNA 2148 | 2148 | CUACUGUGCCCUGCGACGC | 5172 | GCGUCGCAGGGCACAGUAG |
| siRNA 2149 | 2149 | UACUGUGCCCUGCGACGCU | 5173 | AGCGUCGCAGGGCACAGUA |
| siRNA 2150 | 2150 | ACUGUGCCCUGCGACGCUG | 5174 | CAGCGUCGCAGGGCACAGU |
| siRNA 2151 | 2151 | CUGUGCCCUGCGACGCUGC | 5175 | GCAGCGUCGCAGGGCACAG |
| siRNA 2152 | 2152 | UGUGCCCUGCGACGCUGCG | 5176 | CGCAGCGUCGCAGGGCACA |
| siRNA 2153 | 2153 | GUGCCCUGCGACGCUGCGC | 5177 | GCGCAGCGUCGCAGGGCAC |
| siRNA 2154 | 2154 | UGCCCUGCGACGCUGCGCU | 5178 | AGCGCAGCGUCGCAGGGCA |
| siRNA 2155 | 2155 | GCCCUGCGACGCUGCGCUG | 5179 | CAGCGCAGCGUCGCAGGGC |
| siRNA 2156 | 2156 | CCCUGCGACGCUGCGCUGA | 5180 | UCAGCGCAGCGUCGCAGGG |
| siRNA 2157 | 2157 | CCUGCGACGCUGCGCUGAU | 5181 | AUCAGCGCAGCGUCGCAGG |
| siRNA 2158 | 2158 | CUGCGACGCUGCGCUGAUG | 5182 | CAUCAGCGCAGCGUCGCAG |
| siRNA 2159 | 2159 | UGCGACGCUGCGCUGAUGA | 5183 | UCAUCAGCGCAGCGUCGCA |
| siRNA 2160 | 2160 | GCGACGCUGCGCUGAUGAC | 5184 | GUCAUCAGCGCAGCGUCGC |
| siRNA 2161 | 2161 | CGACGCUGCGCUGAUGACC | 5185 | GGUCAUCAGCGCAGCGUCG |
| siRNA 2162 | 2162 | GACGCUGCGCUGAUGACCA | 5186 | UGGUCAUCAGCGCAGCGUC |
| siRNA 2163 | 2163 | ACGCUGCGCUGAUGACCAG | 5187 | CUGGUCAUCAGCGCAGCGU |
| siRNA 2164 | 2164 | CGCUGCGCUGAUGACCAGC | 5188 | GCUGGUCAUCAGCGCAGCG |
| siRNA 2165 | 2165 | GCUGCGCUGAUGACCAGCC | 5189 | GGCUGGUCAUCAGCGCAGC |
| siRNA 2166 | 2166 | CUGCGCUGAUGACCAGCCG | 5190 | CGGCUGGUCAUCAGCGCAG |
| siRNA 2167 | 2167 | UGCGCUGAUGACCAGCCGC | 5191 | GCGGCUGGUCAUCAGCGCA |
| siRNA 2168 | 2168 | GCGCUGAUGACCAGCCGCC | 5192 | GGCGGCUGGUCAUCAGCGC |
| siRNA 2169 | 2169 | CGCUGAUGACCAGCCGCCA | 5193 | UGGCGGCUGGUCAUCAGCG |
| siRNA 2170 | 2170 | GCUGAUGACCAGCCGCCAU | 5194 | AUGGCGGCUGGUCAUCAGC |
| siRNA 2171 | 2171 | CUGAUGACCAGCCGCCAUC | 5195 | GAUGGCGGCUGGUCAUCAG |
| siRNA 2172 | 2172 | UGAUGACCAGCCGCCAUCA | 5196 | UGAUGGCGGCUGGUCAUCA |
| siRNA 2173 | 2173 | GAUGACCAGCCGCCAUCAA | 5197 | UUGAUGGCGGCUGGUCAUC |
| siRNA 2174 | 2174 | AUGACCAGCCGCCAUCAAU | 5198 | AUUGAUGGCGGCUGGUCAU |
| siRNA 2175 | 2175 | UGACCAGCCGCCAUCAAUC | 5199 | GAUUGAUGGCGGCUGGUCA |
| siRNA 2176 | 2176 | GACCAGCCGCCAUCAAUCC | 5200 | GGAUUGAUGGCGGCUGGUC |
| siRNA 2177 | 2177 | ACCAGCCGCCAUCAAUCCU | 5201 | AGGAUUGAUGGCGGCUGGU |
| siRNA 2178 | 2178 | CCAGCCGCCAUCAAUCCUG | 5202 | CAGGAUUGAUGGCGGCUGG |
| siRNA 2179 | 2179 | CAGCCGCCAUCAAUCCUGG | 5203 | CCAGGAUUGAUGGCGGCUG |
| siRNA 2180 | 2180 | AGCCGCCAUCAAUCCUGGA | 5204 | UCCAGGAUUGAUGGCGGCU |
| siRNA 2181 | 2181 | GCCGCCAUCAAUCCUGGAC | 5205 | GUCCAGGAUUGAUGGCGGC |
| siRNA 2182 | 2182 | CCGCCAUCAAUCCUGGACC | 5206 | GGUCCAGGAUUGAUGGCGG |
| siRNA 2183 | 2183 | CGCCAUCAAUCCUGGACCC | 5207 | GGGUCCAGGAUUGAUGGCG |
| siRNA 2184 | 2184 | GCCAUCAAUCCUGGACCCC | 5208 | GGGGUCCAGGAUUGAUGGC |
| siRNA 2185 | 2185 | CCAUCAAUCCUGGACCCCC | 5209 | GGGGGUCCAGGAUUGAUGG |
| siRNA 2186 | 2186 | CAUCAAUCCUGGACCCCCC | 5210 | GGGGGGUCCAGGAUUGAUG |
| siRNA 2187 | 2187 | AUCAAUCCUGGACCCCCCA | 5211 | UGGGGGGUCCAGGAUUGAU |
| siRNA 2188 | 2188 | UCAAUCCUGGACCCCCCAG | 5212 | CUGGGGGGUCCAGGAUUGA |
| siRNA 2189 | 2189 | CAAUCCUGGACCCCCCAGA | 5213 | UCUGGGGGGUCCAGGAUUG |
| siRNA 2190 | 2190 | AAUCCUGGACCCCCCAGAC | 5214 | GUCUGGGGGGUCCAGGAUU |
| siRNA 2191 | 2191 | AUCCUGGACCCCCCAGACC | 5215 | GGUCUGGGGGGUCCAGGAU |
| siRNA 2192 | 2192 | UCCUGGACCCCCCAGACCA | 5216 | UGGUCUGGGGGGUCCAGGA |
| siRNA 2193 | 2193 | CCUGGACCCCCCAGACCAG | 5217 | CUGGUCUGGGGGGUCCAGG |
| siRNA 2194 | 2194 | CUGGACCCCCCAGACCAGG | 5218 | CCUGGUCUGGGGGGUCCAG |
| siRNA 2195 | 2195 | UGGACCCCCCAGACCAGGU | 5219 | ACCUGGUCUGGGGGGUCCA |
| siRNA 2196 | 2196 | GGACCCCCCAGACCAGGUG | 5220 | CACCUGGUCUGGGGGGUCC |
| siRNA 2197 | 2197 | GACCCCCCAGACCAGGUGC | 5221 | GCACCUGGUCUGGGGGGUC |
| siRNA 2198 | 2198 | ACCCCCCAGACCAGGUGCA | 5222 | UGCACCUGGUCUGGGGGGU |
| siRNA 2199 | 2199 | CCCCCCAGACCAGGUGCAG | 5223 | CUGCACCUGGUCUGGGGGG |
| siRNA 2200 | 2200 | CCCCCAGACCAGGUGCAGU | 5224 | ACUGCACCUGGUCUGGGGG |
| siRNA 2201 | 2201 | CCCCAGACCAGGUGCAGUU | 5225 | AACUGCACCUGGUCUGGGG |
| siRNA 2202 | 2202 | CCCAGACCAGGUGCAGUUU | 5226 | AAACUGCACCUGGUCUGGG |
| siRNA 2203 | 2203 | CCAGACCAGGUGCAGUUUG | 5227 | CAAACUGCACCUGGUCUGG |
| siRNA 2204 | 2204 | CAGACCAGGUGCAGUUUGA | 5228 | UCAAACUGCACCUGGUCUG |
| siRNA 2205 | 2205 | AGACCAGGUGCAGUUUGAG | 5229 | CUCAAACUGCACCUGGUCU |
| siRNA 2206 | 2206 | GACCAGGUGCAGUUUGAGA | 5230 | UCUCAAACUGCACCUGGUC |
| siRNA 2207 | 2207 | ACCAGGUGCAGUUUGAGAA | 5231 | UUCUCAAACUGCACCUGGU |
| siRNA 2208 | 2208 | CCAGGUGCAGUUUGAGAAG | 5232 | CUUCUCAAACUGCACCUGG |
| siRNA 2209 | 2209 | CAGGUGCAGUUUGAGAAGU | 5233 | ACUUCUCAAACUGCACCUG |
| siRNA 2210 | 2210 | AGGUGCAGUUUGAGAAGUG | 5234 | CACUUCUCAAACUGCACCU |
| siRNA 2211 | 2211 | GGUGCAGUUUGAGAAGUGU | 5235 | ACACUUCUCAAACUGCACC |
| siRNA 2212 | 2212 | GUGCAGUUUGAGAAGUGUG | 5236 | CACACUUCUCAAACUGCAC |
| siRNA 2213 | 2213 | UGCAGUUUGAGAAGUGUGG | 5237 | CCACACUUCUCAAACUGCA |
| siRNA 2214 | 2214 | GCAGUUUGAGAAGUGUGGC | 5238 | GCCACACUUCUCAAACUGC |
| siRNA 2215 | 2215 | CAGUUUGAGAAGUGUGGCA | 5239 | UGCCACACUUCUCAAACUG |
| siRNA 2216 | 2216 | AGUUUGAGAAGUGUGGCAA | 5240 | UUGCCACACUUCUCAAACU |
| siRNA 2217 | 2217 | GUUUGAGAAGUGUGGCAAG | 5241 | CUUGCCACACUUCUCAAAC |
| siRNA 2218 | 2218 | UUUGAGAAGUGUGGCAAGA | 5242 | UCUUGCCACACUUCUCAAA |
| siRNA 2219 | 2219 | UUGAGAAGUGUGGCAAGAG | 5243 | CUCUUGCCACACUUCUCAA |
| siRNA 2220 | 2220 | UGAGAAGUGUGGCAAGAGG | 5244 | CCUCUUGCCACACUUCUCA |
| siRNA 2221 | 2221 | GAGAAGUGUGGCAAGAGGG | 5245 | CCCUCUUGCCACACUUCUC |
| siRNA 2222 | 2222 | AGAAGUGUGGCAAGAGGGU | 5246 | ACCCUCUUGCCACACUUCU |
| siRNA 2223 | 2223 | GAAGUGUGGCAAGAGGGUG | 5247 | CACCCUCUUGCCACACUUC |
| siRNA 2224 | 2224 | AAGUGUGGCAAGAGGGUGG | 5248 | CCACCCUCUUGCCACACUU |
| siRNA 2225 | 2225 | AGUGUGGCAAGAGGGUGGA | 5249 | UCCACCCUCUUGCCACACU |
| siRNA 2226 | 2226 | GUGUGGCAAGAGGGUGGAU | 5250 | AUCCACCCUCUUGCCACAC |
| siRNA 2227 | 2227 | UGUGGCAAGAGGGUGGAUC | 5251 | GAUCCACCCUCUUGCCACA |
| siRNA 2228 | 2228 | GUGGCAAGAGGGUGGAUCG | 5252 | CGAUCCACCCUCUUGCCAC |
| siRNA 2229 | 2229 | UGGCAAGAGGGUGGAUCGG | 5253 | CCGAUCCACCCUCUUGCCA |
| siRNA 2230 | 2230 | GGCAAGAGGGUGGAUCGGC | 5254 | GCCGAUCCACCCUCUUGCC |
| siRNA 2231 | 2231 | GCAAGAGGGUGGAUCGGCU | 5255 | AGCCGAUCCACCCUCUUGC |
| siRNA 2232 | 2232 | CAAGAGGGUGGAUCGGCUG | 5256 | CAGCCGAUCCACCCUCUUG |
| siRNA 2233 | 2233 | AAGAGGGUGGAUCGGCUGG | 5257 | CCAGCCGAUCCACCCUCUU |
| siRNA 2234 | 2234 | AGAGGGUGGAUCGGCUGGA | 5258 | UCCAGCCGAUCCACCCUCU |
| siRNA 2235 | 2235 | GAGGGUGGAUCGGCUGGAU | 5259 | AUCCAGCCGAUCCACCCUC |
| siRNA 2236 | 2236 | AGGGUGGAUCGGCUGGAUC | 5260 | GAUCCAGCCGAUCCACCCU |
| siRNA 2237 | 2237 | GGGUGGAUCGGCUGGAUCA | 5261 | UGAUCCAGCCGAUCCACCC |
| siRNA 2238 | 2238 | GGUGGAUCGGCUGGAUCAG | 5262 | CUGAUCCAGCCGAUCCACC |
| siRNA 2239 | 2239 | GUGGAUCGGCUGGAUCAGC | 5263 | GCUGAUCCAGCCGAUCCAC |
| siRNA 2240 | 2240 | UGGAUCGGCUGGAUCAGCG | 5264 | CGCUGAUCCAGCCGAUCCA |
| siRNA 2241 | 2241 | GGAUCGGCUGGAUCAGCGG | 5265 | CCGCUGAUCCAGCCGAUCC |
| siRNA 2242 | 2242 | GAUCGGCUGGAUCAGCGGC | 5266 | GCCGCUGAUCCAGCCGAUC |
| siRNA 2243 | 2243 | AUCGGCUGGAUCAGCGGCG | 5267 | CGCCGCUGAUCCAGCCGAU |
| siRNA 2244 | 2244 | UCGGCUGGAUCAGCGGCGU | 5268 | ACGCCGCUGAUCCAGCCGA |
| siRNA 2245 | 2245 | CGGCUGGAUCAGCGGCGUU | 5269 | AACGCCGCUGAUCCAGCCG |
| siRNA 2246 | 2246 | GGCUGGAUCAGCGGCGUUC | 5270 | GAACGCCGCUGAUCCAGCC |
| siRNA 2247 | 2247 | GCUGGAUCAGCGGCGUUCC | 5271 | GGAACGCCGCUGAUCCAGC |
| siRNA 2248 | 2248 | CUGGAUCAGCGGCGUUCCA | 5272 | UGGAACGCCGCUGAUCCAG |
| siRNA 2249 | 2249 | UGGAUCAGCGGCGUUCCAA | 5273 | UUGGAACGCCGCUGAUCCA |
| siRNA 2250 | 2250 | GGAUCAGCGGCGUUCCAAG | 5274 | CUUGGAACGCCGCUGAUCC |
| siRNA 2251 | 2251 | GAUCAGCGGCGUUCCAAGC | 5275 | GCUUGGAACGCCGCUGAUC |
| siRNA 2252 | 2252 | AUCAGCGGCGUUCCAAGCU | 5276 | AGCUUGGAACGCCGCUGAU |
| siRNA 2253 | 2253 | UCAGCGGCGUUCCAAGCUG | 5277 | CAGCUUGGAACGCCGCUGA |
| siRNA 2254 | 2254 | CAGCGGCGUUCCAAGCUGC | 5278 | GCAGCUUGGAACGCCGCUG |
| siRNA 2255 | 2255 | AGCGGCGUUCCAAGCUGCG | 5279 | CGCAGCUUGGAACGCCGCU |
| siRNA 2256 | 2256 | GCGGCGUUCCAAGCUGCGC | 5280 | GCGCAGCUUGGAACGCCGC |
| siRNA 2257 | 2257 | CGGCGUUCCAAGCUGCGCG | 5281 | CGCGCAGCUUGGAACGCCG |
| siRNA 2258 | 2258 | GGCGUUCCAAGCUGCGCGU | 5282 | ACGCGCAGCUUGGAACGCC |
| siRNA 2259 | 2259 | GCGUUCCAAGCUGCGCGUG | 5283 | CACGCGCAGCUUGGAACGC |
| siRNA 2260 | 2260 | CGUUCCAAGCUGCGCGUGG | 5284 | CCACGCGCAGCUUGGAACG |
| siRNA 2261 | 2261 | GUUCCAAGCUGCGCGUGGU | 5285 | ACCACGCGCAGCUUGGAAC |
| siRNA 2262 | 2262 | UUCCAAGCUGCGCGUGGUU | 5286 | AACCACGCGCAGCUUGGAA |
| siRNA 2263 | 2263 | UCCAAGCUGCGCGUGGUUG | 5287 | CAACCACGCGCAGCUUGGA |
| siRNA 2264 | 2264 | CCAAGCUGCGCGUGGUUGG | 5288 | CCAACCACGCGCAGCUUGG |
| siRNA 2265 | 2265 | CAAGCUGCGCGUGGUUGGG | 5289 | CCCAACCACGCGCAGCUUG |
| siRNA 2266 | 2266 | AAGCUGCGCGUGGUUGGGG | 5290 | CCCCAACCACGCGCAGCUU |
| siRNA 2267 | 2267 | AGCUGCGCGUGGUUGGGGG | 5291 | CCCCCAACCACGCGCAGCU |
| siRNA 2268 | 2268 | GCUGCGCGUGGUUGGGGGC | 5292 | GCCCCCAACCACGCGCAGC |
| siRNA 2269 | 2269 | CUGCGCGUGGUUGGGGGCC | 5293 | GGCCCCCAACCACGCGCAG |
| siRNA 2270 | 2270 | UGCGCGUGGUUGGGGGCCA | 5294 | UGGCCCCCAACCACGCGCA |
| siRNA 2271 | 2271 | GCGCGUGGUUGGGGGCCAU | 5295 | AUGGCCCCCAACCACGCGC |
| siRNA 2272 | 2272 | CGCGUGGUUGGGGGCCAUC | 5296 | GAUGGCCCCCAACCACGCG |
| siRNA 2273 | 2273 | GCGUGGUUGGGGGCCAUCC | 5297 | GGAUGGCCCCCAACCACGC |
| siRNA 2274 | 2274 | CGUGGUUGGGGGCCAUCCG | 5298 | CGGAUGGCCCCCAACCACG |
| siRNA 2275 | 2275 | GUGGUUGGGGGCCAUCCGG | 5299 | CCGGAUGGCCCCCAACCAC |
| siRNA 2276 | 2276 | UGGUUGGGGGCCAUCCGGG | 5300 | CCCGGAUGGCCCCCAACCA |
| siRNA 2277 | 2277 | GGUUGGGGGCCAUCCGGGC | 5301 | GCCCGGAUGGCCCCCAACC |
| siRNA 2278 | 2278 | GUUGGGGGCCAUCCGGGCA | 5302 | UGCCCGGAUGGCCCCCAAC |
| siRNA 2279 | 2279 | UUGGGGGCCAUCCGGGCAA | 5303 | UUGCCCGGAUGGCCCCCAA |
| siRNA 2280 | 2280 | UGGGGGCCAUCCGGGCAAC | 5304 | GUUGCCCGGAUGGCCCCCA |
| siRNA 2281 | 2281 | GGGGGCCAUCCGGGCAACU | 5305 | AGUUGCCCGGAUGGCCCCC |
| siRNA 2282 | 2282 | GGGGCCAUCCGGGCAACUC | 5306 | GAGUUGCCCGGAUGGCCCC |
| siRNA 2283 | 2283 | GGGCCAUCCGGGCAACUCA | 5307 | UGAGUUGCCCGGAUGGCCC |
| siRNA 2284 | 2284 | GGCCAUCCGGGCAACUCAC | 5308 | GUGAGUUGCCCGGAUGGCC |
| siRNA 2285 | 2285 | GCCAUCCGGGCAACUCACC | 5309 | GGUGAGUUGCCCGGAUGGC |
| siRNA 2286 | 2286 | CCAUCCGGGCAACUCACCC | 5310 | GGGUGAGUUGCCCGGAUGG |
| siRNA 2287 | 2287 | CAUCCGGGCAACUCACCCU | 5311 | AGGGUGAGUUGCCCGGAUG |
| siRNA 2288 | 2288 | AUCCGGGCAACUCACCCUG | 5312 | CAGGGUGAGUUGCCCGGAU |
| siRNA 2289 | 2289 | UCCGGGCAACUCACCCUGG | 5313 | CCAGGGUGAGUUGCCCGGA |
| siRNA 2290 | 2290 | CCGGGCAACUCACCCUGGA | 5314 | UCCAGGGUGAGUUGCCCGG |
| siRNA 2291 | 2291 | CGGGCAACUCACCCUGGAC | 5315 | GUCCAGGGUGAGUUGCCCG |
| siRNA 2292 | 2292 | GGGCAACUCACCCUGGACA | 5316 | UGUCCAGGGUGAGUUGCCC |
| siRNA 2293 | 2293 | GGCAACUCACCCUGGACAG | 5317 | CUGUCCAGGGUGAGUUGCC |
| siRNA 2294 | 2294 | GCAACUCACCCUGGACAGU | 5318 | ACUGUCCAGGGUGAGUUGC |
| siRNA 2295 | 2295 | CAACUCACCCUGGACAGUC | 5319 | GACUGUCCAGGGUGAGUUG |
| siRNA 2296 | 2296 | AACUCACCCUGGACAGUCA | 5320 | UGACUGUCCAGGGUGAGUU |
| siRNA 2297 | 2297 | ACUCACCCUGGACAGUCAG | 5321 | CUGACUGUCCAGGGUGAGU |
| siRNA 2298 | 2298 | CUCACCCUGGACAGUCAGC | 5322 | GCUGACUGUCCAGGGUGAG |
| siRNA 2299 | 2299 | UCACCCUGGACAGUCAGCU | 5323 | AGCUGACUGUCCAGGGUGA |
| siRNA 2300 | 2300 | CACCCUGGACAGUCAGCUU | 5324 | AAGCUGACUGUCCAGGGUG |
| siRNA 2301 | 2301 | ACCCUGGACAGUCAGCUUG | 5325 | CAAGCUGACUGUCCAGGGU |
| siRNA 2302 | 2302 | CCCUGGACAGUCAGCUUGC | 5326 | GCAAGCUGACUGUCCAGGG |
| siRNA 2303 | 2303 | CCUGGACAGUCAGCUUGCG | 5327 | CGCAAGCUGACUGUCCAGG |
| siRNA 2304 | 2304 | CUGGACAGUCAGCUUGCGG | 5328 | CCGCAAGCUGACUGUCCAG |
| siRNA 2305 | 2305 | UGGACAGUCAGCUUGCGGA | 5329 | UCCGCAAGCUGACUGUCCA |
| siRNA 2306 | 2306 | GGACAGUCAGCUUGCGGAA | 5330 | UUCCGCAAGCUGACUGUCC |
| siRNA 2307 | 2307 | GACAGUCAGCUUGCGGAAU | 5331 | AUUCCGCAAGCUGACUGUC |
| siRNA 2308 | 2308 | ACAGUCAGCUUGCGGAAUC | 5332 | GAUUCCGCAAGCUGACUGU |
| siRNA 2309 | 2309 | CAGUCAGCUUGCGGAAUCG | 5333 | CGAUUCCGCAAGCUGACUG |
| siRNA 2310 | 2310 | AGUCAGCUUGCGGAAUCGG | 5334 | CCGAUUCCGCAAGCUGACU |
| siRNA 2311 | 2311 | GUCAGCUUGCGGAAUCGGC | 5335 | GCCGAUUCCGCAAGCUGAC |
| siRNA 2312 | 2312 | UCAGCUUGCGGAAUCGGCA | 5336 | UGCCGAUUCCGCAAGCUGA |
| siRNA 2313 | 2313 | CAGCUUGCGGAAUCGGCAG | 5337 | CUGCCGAUUCCGCAAGCUG |
| siRNA 2314 | 2314 | AGCUUGCGGAAUCGGCAGG | 5338 | CCUGCCGAUUCCGCAAGCU |
| siRNA 2315 | 2315 | GCUUGCGGAAUCGGCAGGG | 5339 | CCCUGCCGAUUCCGCAAGC |
| siRNA 2316 | 2316 | CUUGCGGAAUCGGCAGGGC | 5340 | GCCCUGCCGAUUCCGCAAG |
| siRNA 2317 | 2317 | UUGCGGAAUCGGCAGGGCC | 5341 | GGCCCUGCCGAUUCCGCAA |
| siRNA 2318 | 2318 | UGCGGAAUCGGCAGGGCCA | 5342 | UGGCCCUGCCGAUUCCGCA |
| siRNA 2319 | 2319 | GCGGAAUCGGCAGGGCCAG | 5343 | CUGGCCCUGCCGAUUCCGC |
| siRNA 2320 | 2320 | CGGAAUCGGCAGGGCCAGC | 5344 | GCUGGCCCUGCCGAUUCCG |
| siRNA 2321 | 2321 | GGAAUCGGCAGGGCCAGCA | 5345 | UGCUGGCCCUGCCGAUUCC |
| siRNA 2322 | 2322 | GAAUCGGCAGGGCCAGCAU | 5346 | AUGCUGGCCCUGCCGAUUC |
| siRNA 2323 | 2323 | AAUCGGCAGGGCCAGCAUU | 5347 | AAUGCUGGCCCUGCCGAUU |
| siRNA 2324 | 2324 | AUCGGCAGGGCCAGCAUUU | 5348 | AAAUGCUGGCCCUGCCGAU |
| siRNA 2325 | 2325 | UCGGCAGGGCCAGCAUUUC | 5349 | GAAAUGCUGGCCCUGCCGA |
| siRNA 2326 | 2326 | CGGCAGGGCCAGCAUUUCU | 5350 | AGAAAUGCUGGCCCUGCCG |
| siRNA 2327 | 2327 | GGCAGGGCCAGCAUUUCUG | 5351 | CAGAAAUGCUGGCCCUGCC |
| siRNA 2328 | 2328 | GCAGGGCCAGCAUUUCUGC | 5352 | GCAGAAAUGCUGGCCCUGC |
| siRNA 2329 | 2329 | CAGGGCCAGCAUUUCUGCG | 5353 | CGCAGAAAUGCUGGCCCUG |
| siRNA 2330 | 2330 | AGGGCCAGCAUUUCUGCGG | 5354 | CCGCAGAAAUGCUGGCCCU |
| siRNA 2331 | 2331 | GGGCCAGCAUUUCUGCGGG | 5355 | CCCGCAGAAAUGCUGGCCC |
| siRNA 2332 | 2332 | GGCCAGCAUUUCUGCGGGG | 5356 | CCCCGCAGAAAUGCUGGCC |
| siRNA 2333 | 2333 | GCCAGCAUUUCUGCGGGGG | 5357 | CCCCCGCAGAAAUGCUGGC |
| siRNA 2334 | 2334 | CCAGCAUUUCUGCGGGGGG | 5358 | CCCCCCGCAGAAAUGCUGG |
| siRNA 2335 | 2335 | CAGCAUUUCUGCGGGGGGU | 5359 | ACCCCCCGCAGAAAUGCUG |
| siRNA 2336 | 2336 | AGCAUUUCUGCGGGGGGUC | 5360 | GACCCCCCGCAGAAAUGCU |
| siRNA 2337 | 2337 | GCAUUUCUGCGGGGGGUCU | 5361 | AGACCCCCCGCAGAAAUGC |
| siRNA 2338 | 2338 | CAUUUCUGCGGGGGGUCUC | 5362 | GAGACCCCCCGCAGAAAUG |
| siRNA 2339 | 2339 | AUUUCUGCGGGGGGUCUCU | 5363 | AGAGACCCCCCGCAGAAAU |
| siRNA 2340 | 2340 | UUUCUGCGGGGGGUCUCUA | 5364 | UAGAGACCCCCCGCAGAAA |
| siRNA 2341 | 2341 | UUCUGCGGGGGGUCUCUAG | 5365 | CUAGAGACCCCCCGCAGAA |
| siRNA 2342 | 2342 | UCUGCGGGGGGUCUCUAGU | 5366 | ACUAGAGACCCCCCGCAGA |
| siRNA 2343 | 2343 | CUGCGGGGGGUCUCUAGUG | 5367 | CACUAGAGACCCCCCGCAG |
| siRNA 2344 | 2344 | UGCGGGGGGUCUCUAGUGA | 5368 | UCACUAGAGACCCCCCGCA |
| siRNA 2345 | 2345 | GCGGGGGGUCUCUAGUGAA | 5369 | UUCACUAGAGACCCCCCGC |
| siRNA 2346 | 2346 | CGGGGGGUCUCUAGUGAAG | 5370 | CUUCACUAGAGACCCCCCG |
| siRNA 2347 | 2347 | GGGGGGUCUCUAGUGAAGG | 5371 | CCUUCACUAGAGACCCCCC |
| siRNA 2348 | 2348 | GGGGGUCUCUAGUGAAGGA | 5372 | UCCUUCACUAGAGACCCCC |
| siRNA 2349 | 2349 | GGGGUCUCUAGUGAAGGAG | 5373 | CUCCUUCACUAGAGACCCC |
| siRNA 2350 | 2350 | GGGUCUCUAGUGAAGGAGC | 5374 | GCUCCUUCACUAGAGACCC |
| siRNA 2351 | 2351 | GGUCUCUAGUGAAGGAGCA | 5375 | UGCUCCUUCACUAGAGACC |
| siRNA 2352 | 2352 | GUCUCUAGUGAAGGAGCAG | 5376 | CUGCUCCUUCACUAGAGAC |
| siRNA 2353 | 2353 | UCUCUAGUGAAGGAGCAGU | 5377 | ACUGCUCCUUCACUAGAGA |
| siRNA 2354 | 2354 | CUCUAGUGAAGGAGCAGUG | 5378 | CACUGCUCCUUCACUAGAG |
| siRNA 2355 | 2355 | UCUAGUGAAGGAGCAGUGG | 5379 | CCACUGCUCCUUCACUAGA |
| siRNA 2356 | 2356 | CUAGUGAAGGAGCAGUGGA | 5380 | UCCACUGCUCCUUCACUAG |
| siRNA 2357 | 2357 | UAGUGAAGGAGCAGUGGAU | 5381 | AUCCACUGCUCCUUCACUA |
| siRNA 2358 | 2358 | AGUGAAGGAGCAGUGGAUA | 5382 | UAUCCACUGCUCCUUCACU |
| siRNA 2359 | 2359 | GUGAAGGAGCAGUGGAUAC | 5383 | GUAUCCACUGCUCCUUCAC |
| siRNA 2360 | 2360 | UGAAGGAGCAGUGGAUACU | 5384 | AGUAUCCACUGCUCCUUCA |
| siRNA 2361 | 2361 | GAAGGAGCAGUGGAUACUG | 5385 | CAGUAUCCACUGCUCCUUC |
| siRNA 2362 | 2362 | AAGGAGCAGUGGAUACUGA | 5386 | UCAGUAUCCACUGCUCCUU |
| siRNA 2363 | 2363 | AGGAGCAGUGGAUACUGAC | 5387 | GUCAGUAUCCACUGCUCCU |
| siRNA 2364 | 2364 | GGAGCAGUGGAUACUGACU | 5388 | AGUCAGUAUCCACUGCUCC |
| siRNA 2365 | 2365 | GAGCAGUGGAUACUGACUG | 5389 | CAGUCAGUAUCCACUGCUC |
| siRNA 2366 | 2366 | AGCAGUGGAUACUGACUGC | 5390 | GCAGUCAGUAUCCACUGCU |
| siRNA 2367 | 2367 | GCAGUGGAUACUGACUGCC | 5391 | GGCAGUCAGUAUCCACUGC |
| siRNA 2368 | 2368 | CAGUGGAUACUGACUGCCC | 5392 | GGGCAGUCAGUAUCCACUG |
| siRNA 2369 | 2369 | AGUGGAUACUGACUGCCCG | 5393 | CGGGCAGUCAGUAUCCACU |
| siRNA 2370 | 2370 | GUGGAUACUGACUGCCCGG | 5394 | CCGGGCAGUCAGUAUCCAC |
| siRNA 2371 | 2371 | UGGAUACUGACUGCCCGGC | 5395 | GCCGGGCAGUCAGUAUCCA |
| siRNA 2372 | 2372 | GGAUACUGACUGCCCGGCA | 5396 | UGCCGGGCAGUCAGUAUCC |
| siRNA 2373 | 2373 | GAUACUGACUGCCCGGCAG | 5397 | CUGCCGGGCAGUCAGUAUC |
| siRNA 2374 | 2374 | AUACUGACUGCCCGGCAGU | 5398 | ACUGCCGGGCAGUCAGUAU |
| siRNA 2375 | 2375 | UACUGACUGCCCGGCAGUG | 5399 | CACUGCCGGGCAGUCAGUA |
| siRNA 2376 | 2376 | ACUGACUGCCCGGCAGUGC | 5400 | GCACUGCCGGGCAGUCAGU |
| siRNA 2377 | 2377 | CUGACUGCCCGGCAGUGCU | 5401 | AGCACUGCCGGGCAGUCAG |
| siRNA 2378 | 2378 | UGACUGCCCGGCAGUGCUU | 5402 | AAGCACUGCCGGGCAGUCA |
| siRNA 2379 | 2379 | GACUGCCCGGCAGUGCUUC | 5403 | GAAGCACUGCCGGGCAGUC |
| siRNA 2380 | 2380 | ACUGCCCGGCAGUGCUUCU | 5404 | AGAAGCACUGCCGGGCAGU |
| siRNA 2381 | 2381 | CUGCCCGGCAGUGCUUCUC | 5405 | GAGAAGCACUGCCGGGCAG |
| siRNA 2382 | 2382 | UGCCCGGCAGUGCUUCUCC | 5406 | GGAGAAGCACUGCCGGGCA |
| siRNA 2383 | 2383 | GCCCGGCAGUGCUUCUCCU | 5407 | AGGAGAAGCACUGCCGGGC |
| siRNA 2384 | 2384 | CCCGGCAGUGCUUCUCCUC | 5408 | GAGGAGAAGCACUGCCGGG |
| siRNA 2385 | 2385 | CCGGCAGUGCUUCUCCUCC | 5409 | GGAGGAGAAGCACUGCCGG |
| siRNA 2386 | 2386 | CGGCAGUGCUUCUCCUCCU | 5410 | AGGAGGAGAAGCACUGCCG |
| siRNA 2387 | 2387 | GGCAGUGCUUCUCCUCCUG | 5411 | CAGGAGGAGAAGCACUGCC |
| siRNA 2388 | 2388 | GCAGUGCUUCUCCUCCUGC | 5412 | GCAGGAGGAGAAGCACUGC |
| siRNA 2389 | 2389 | CAGUGCUUCUCCUCCUGCC | 5413 | GGCAGGAGGAGAAGCACUG |
| siRNA 2390 | 2390 | AGUGCUUCUCCUCCUGCCA | 5414 | UGGCAGGAGGAGAAGCACU |
| siRNA 2391 | 2391 | GUGCUUCUCCUCCUGCCAU | 5415 | AUGGCAGGAGGAGAAGCAC |
| siRNA 2392 | 2392 | UGCUUCUCCUCCUGCCAUA | 5416 | UAUGGCAGGAGGAGAAGCA |
| siRNA 2393 | 2393 | GCUUCUCCUCCUGCCAUAU | 5417 | AUAUGGCAGGAGGAGAAGC |
| siRNA 2394 | 2394 | CUUCUCCUCCUGCCAUAUG | 5418 | CAUAUGGCAGGAGGAGAAG |
| siRNA 2395 | 2395 | UUCUCCUCCUGCCAUAUGC | 5419 | GCAUAUGGCAGGAGGAGAA |
| siRNA 2396 | 2396 | UCUCCUCCUGCCAUAUGCC | 5420 | GGCAUAUGGCAGGAGGAGA |
| siRNA 2397 | 2397 | CUCCUCCUGCCAUAUGCCU | 5421 | AGGCAUAUGGCAGGAGGAG |
| siRNA 2398 | 2398 | UCCUCCUGCCAUAUGCCUC | 5422 | GAGGCAUAUGGCAGGAGGA |
| siRNA 2399 | 2399 | CCUCCUGCCAUAUGCCUCU | 5423 | AGAGGCAUAUGGCAGGAGG |
| siRNA 2400 | 2400 | CUCCUGCCAUAUGCCUCUC | 5424 | GAGAGGCAUAUGGCAGGAG |
| siRNA 2401 | 2401 | UCCUGCCAUAUGCCUCUCA | 5425 | UGAGAGGCAUAUGGCAGGA |
| siRNA 2402 | 2402 | CCUGCCAUAUGCCUCUCAC | 5426 | GUGAGAGGCAUAUGGCAGG |
| siRNA 2403 | 2403 | CUGCCAUAUGCCUCUCACG | 5427 | CGUGAGAGGCAUAUGGCAG |
| siRNA 2404 | 2404 | UGCCAUAUGCCUCUCACGG | 5428 | CCGUGAGAGGCAUAUGGCA |
| siRNA 2405 | 2405 | GCCAUAUGCCUCUCACGGG | 5429 | CCCGUGAGAGGCAUAUGGC |
| siRNA 2406 | 2406 | CCAUAUGCCUCUCACGGGC | 5430 | GCCCGUGAGAGGCAUAUGG |
| siRNA 2407 | 2407 | CAUAUGCCUCUCACGGGCU | 5431 | AGCCCGUGAGAGGCAUAUG |
| siRNA 2408 | 2408 | AUAUGCCUCUCACGGGCUA | 5432 | UAGCCCGUGAGAGGCAUAU |
| siRNA 2409 | 2409 | UAUGCCUCUCACGGGCUAU | 5433 | AUAGCCCGUGAGAGGCAUA |
| siRNA 2410 | 2410 | AUGCCUCUCACGGGCUAUG | 5434 | CAUAGCCCGUGAGAGGCAU |
| siRNA 2411 | 2411 | UGCCUCUCACGGGCUAUGA | 5435 | UCAUAGCCCGUGAGAGGCA |
| siRNA 2412 | 2412 | GCCUCUCACGGGCUAUGAG | 5436 | CUCAUAGCCCGUGAGAGGC |
| siRNA 2413 | 2413 | CCUCUCACGGGCUAUGAGG | 5437 | CCUCAUAGCCCGUGAGAGG |
| siRNA 2414 | 2414 | CUCUCACGGGCUAUGAGGU | 5438 | ACCUCAUAGCCCGUGAGAG |
| siRNA 2415 | 2415 | UCUCACGGGCUAUGAGGUA | 5439 | UACCUCAUAGCCCGUGAGA |
| siRNA 2416 | 2416 | CUCACGGGCUAUGAGGUAU | 5440 | AUACCUCAUAGCCCGUGAG |
| siRNA 2417 | 2417 | UCACGGGCUAUGAGGUAUG | 5441 | CAUACCUCAUAGCCCGUGA |
| siRNA 2418 | 2418 | CACGGGCUAUGAGGUAUGG | 5442 | CCAUACCUCAUAGCCCGUG |
| siRNA 2419 | 2419 | ACGGGCUAUGAGGUAUGGU | 5443 | ACCAUACCUCAUAGCCCGU |
| siRNA 2420 | 2420 | CGGGCUAUGAGGUAUGGUU | 5444 | AACCAUACCUCAUAGCCCG |
| siRNA 2421 | 2421 | GGGCUAUGAGGUAUGGUUG | 5445 | CAACCAUACCUCAUAGCCC |
| siRNA 2422 | 2422 | GGCUAUGAGGUAUGGUUGG | 5446 | CCAACCAUACCUCAUAGCC |
| siRNA 2423 | 2423 | GCUAUGAGGUAUGGUUGGG | 5447 | CCCAACCAUACCUCAUAGC |
| siRNA 2424 | 2424 | CUAUGAGGUAUGGUUGGGC | 5448 | GCCCAACCAUACCUCAUAG |
| siRNA 2425 | 2425 | UAUGAGGUAUGGUUGGGCA | 5449 | UGCCCAACCAUACCUCAUA |
| siRNA 2426 | 2426 | AUGAGGUAUGGUUGGGCAC | 5450 | GUGCCCAACCAUACCUCAU |
| siRNA 2427 | 2427 | UGAGGUAUGGUUGGGCACC | 5451 | GGUGCCCAACCAUACCUCA |
| siRNA 2428 | 2428 | GAGGUAUGGUUGGGCACCC | 5452 | GGGUGCCCAACCAUACCUC |
| siRNA 2429 | 2429 | AGGUAUGGUUGGGCACCCU | 5453 | AGGGUGCCCAACCAUACCU |
| siRNA 2430 | 2430 | GGUAUGGUUGGGCACCCUG | 5454 | CAGGGUGCCCAACCAUACC |
| siRNA 2431 | 2431 | GUAUGGUUGGGCACCCUGU | 5455 | ACAGGGUGCCCAACCAUAC |
| siRNA 2432 | 2432 | UAUGGUUGGGCACCCUGUU | 5456 | AACAGGGUGCCCAACCAUA |
| siRNA 2433 | 2433 | AUGGUUGGGCACCCUGUUC | 5457 | GAACAGGGUGCCCAACCAU |
| siRNA 2434 | 2434 | UGGUUGGGCACCCUGUUCC | 5458 | GGAACAGGGUGCCCAACCA |
| siRNA 2435 | 2435 | GGUUGGGCACCCUGUUCCA | 5459 | UGGAACAGGGUGCCCAACC |
| siRNA 2436 | 2436 | GUUGGGCACCCUGUUCCAG | 5460 | CUGGAACAGGGUGCCCAAC |
| siRNA 2437 | 2437 | UUGGGCACCCUGUUCCAGA | 5461 | UCUGGAACAGGGUGCCCAA |
| siRNA 2438 | 2438 | UGGGCACCCUGUUCCAGAA | 5462 | UUCUGGAACAGGGUGCCCA |
| siRNA 2439 | 2439 | GGGCACCCUGUUCCAGAAC | 5463 | GUUCUGGAACAGGGUGCCC |
| siRNA 2440 | 2440 | GGCACCCUGUUCCAGAACC | 5464 | GGUUCUGGAACAGGGUGCC |
| siRNA 2441 | 2441 | GCACCCUGUUCCAGAACCC | 5465 | GGGUUCUGGAACAGGGUGC |
| siRNA 2442 | 2442 | CACCCUGUUCCAGAACCCA | 5466 | UGGGUUCUGGAACAGGGUG |
| siRNA 2443 | 2443 | ACCCUGUUCCAGAACCCAC | 5467 | GUGGGUUCUGGAACAGGGU |
| siRNA 2444 | 2444 | CCCUGUUCCAGAACCCACA | 5468 | UGUGGGUUCUGGAACAGGG |
| siRNA 2445 | 2445 | CCUGUUCCAGAACCCACAG | 5469 | CUGUGGGUUCUGGAACAGG |
| siRNA 2446 | 2446 | CUGUUCCAGAACCCACAGC | 5470 | GCUGUGGGUUCUGGAACAG |
| siRNA 2447 | 2447 | UGUUCCAGAACCCACAGCA | 5471 | UGCUGUGGGUUCUGGAACA |
| siRNA 2448 | 2448 | GUUCCAGAACCCACAGCAU | 5472 | AUGCUGUGGGUUCUGGAAC |
| siRNA 2449 | 2449 | UUCCAGAACCCACAGCAUG | 5473 | CAUGCUGUGGGUUCUGGAA |
| siRNA 2450 | 2450 | UCCAGAACCCACAGCAUGG | 5474 | CCAUGCUGUGGGUUCUGGA |
| siRNA 2451 | 2451 | CCAGAACCCACAGCAUGGA | 5475 | UCCAUGCUGUGGGUUCUGG |
| siRNA 2452 | 2452 | CAGAACCCACAGCAUGGAG | 5476 | CUCCAUGCUGUGGGUUCUG |
| siRNA 2453 | 2453 | AGAACCCACAGCAUGGAGA | 5477 | UCUCCAUGCUGUGGGUUCU |
| siRNA 2454 | 2454 | GAACCCACAGCAUGGAGAG | 5478 | CUCUCCAUGCUGUGGGUUC |
| siRNA 2455 | 2455 | AACCCACAGCAUGGAGAGC | 5479 | GCUCUCCAUGCUGUGGGUU |
| siRNA 2456 | 2456 | ACCCACAGCAUGGAGAGCC | 5480 | GGCUCUCCAUGCUGUGGGU |
| siRNA 2457 | 2457 | CCCACAGCAUGGAGAGCCA | 5481 | UGGCUCUCCAUGCUGUGGG |
| siRNA 2458 | 2458 | CCACAGCAUGGAGAGCCAA | 5482 | UUGGCUCUCCAUGCUGUGG |
| siRNA 2459 | 2459 | CACAGCAUGGAGAGCCAAG | 5483 | CUUGGCUCUCCAUGCUGUG |
| siRNA 2460 | 2460 | ACAGCAUGGAGAGCCAAGC | 5484 | GCUUGGCUCUCCAUGCUGU |
| siRNA 2461 | 2461 | CAGCAUGGAGAGCCAAGCC | 5485 | GGCUUGGCUCUCCAUGCUG |
| siRNA 2462 | 2462 | AGCAUGGAGAGCCAAGCCU | 5486 | AGGCUUGGCUCUCCAUGCU |
| siRNA 2463 | 2463 | GCAUGGAGAGCCAAGCCUA | 5487 | UAGGCUUGGCUCUCCAUGC |
| siRNA 2464 | 2464 | CAUGGAGAGCCAAGCCUAC | 5488 | GUAGGCUUGGCUCUCCAUG |
| siRNA 2465 | 2465 | AUGGAGAGCCAAGCCUACA | 5489 | UGUAGGCUUGGCUCUCCAU |
| siRNA 2466 | 2466 | UGGAGAGCCAAGCCUACAG | 5490 | CUGUAGGCUUGGCUCUCCA |
| siRNA 2467 | 2467 | GGAGAGCCAAGCCUACAGC | 5491 | GCUGUAGGCUUGGCUCUCC |
| siRNA 2468 | 2468 | GAGAGCCAAGCCUACAGCG | 5492 | CGCUGUAGGCUUGGCUCUC |
| siRNA 2469 | 2469 | AGAGCCAAGCCUACAGCGG | 5493 | CCGCUGUAGGCUUGGCUCU |
| siRNA 2470 | 2470 | GAGCCAAGCCUACAGCGGG | 5494 | CCCGCUGUAGGCUUGGCUC |
| siRNA 2471 | 2471 | AGCCAAGCCUACAGCGGGU | 5495 | ACCCGCUGUAGGCUUGGCU |
| siRNA 2472 | 2472 | GCCAAGCCUACAGCGGGUC | 5496 | GACCCGCUGUAGGCUUGGC |
| siRNA 2473 | 2473 | CCAAGCCUACAGCGGGUCC | 5497 | GGACCCGCUGUAGGCUUGG |
| siRNA 2474 | 2474 | CAAGCCUACAGCGGGUCCC | 5498 | GGGACCCGCUGUAGGCUUG |
| siRNA 2475 | 2475 | AAGCCUACAGCGGGUCCCA | 5499 | UGGGACCCGCUGUAGGCUU |
| siRNA 2476 | 2476 | AGCCUACAGCGGGUCCCAG | 5500 | CUGGGACCCGCUGUAGGCU |
| siRNA 2477 | 2477 | GCCUACAGCGGGUCCCAGU | 5501 | ACUGGGACCCGCUGUAGGC |
| siRNA 2478 | 2478 | CCUACAGCGGGUCCCAGUA | 5502 | UACUGGGACCCGCUGUAGG |
| siRNA 2479 | 2479 | CUACAGCGGGUCCCAGUAG | 5503 | CUACUGGGACCCGCUGUAG |
| siRNA 2480 | 2480 | UACAGCGGGUCCCAGUAGC | 5504 | GCUACUGGGACCCGCUGUA |
| siRNA 2481 | 2481 | ACAGCGGGUCCCAGUAGCC | 5505 | GGCUACUGGGACCCGCUGU |
| siRNA 2482 | 2482 | CAGCGGGUCCCAGUAGCCA | 5506 | UGGCUACUGGGACCCGCUG |
| siRNA 2483 | 2483 | AGCGGGUCCCAGUAGCCAA | 5507 | UUGGCUACUGGGACCCGCU |
| siRNA 2484 | 2484 | GCGGGUCCCAGUAGCCAAG | 5508 | CUUGGCUACUGGGACCCGC |
| siRNA 2485 | 2485 | CGGGUCCCAGUAGCCAAGA | 5509 | UCUUGGCUACUGGGACCCG |
| siRNA 2486 | 2486 | GGGUCCCAGUAGCCAAGAU | 5510 | AUCUUGGCUACUGGGACCC |
| siRNA 2487 | 2487 | GGUCCCAGUAGCCAAGAUG | 5511 | CAUCUUGGCUACUGGGACC |
| siRNA 2488 | 2488 | GUCCCAGUAGCCAAGAUGG | 5512 | CCAUCUUGGCUACUGGGAC |
| siRNA 2489 | 2489 | UCCCAGUAGCCAAGAUGGU | 5513 | ACCAUCUUGGCUACUGGGA |
| siRNA 2490 | 2490 | CCCAGUAGCCAAGAUGGUG | 5514 | CACCAUCUUGGCUACUGGG |
| siRNA 2491 | 2491 | CCAGUAGCCAAGAUGGUGU | 5515 | ACACCAUCUUGGCUACUGG |
| siRNA 2492 | 2492 | CAGUAGCCAAGAUGGUGUG | 5516 | CACACCAUCUUGGCUACUG |
| siRNA 2493 | 2493 | AGUAGCCAAGAUGGUGUGU | 5517 | ACACACCAUCUUGGCUACU |
| siRNA 2494 | 2494 | GUAGCCAAGAUGGUGUGUG | 5518 | CACACACCAUCUUGGCUAC |
| siRNA 2495 | 2495 | UAGCCAAGAUGGUGUGUGG | 5519 | CCACACACCAUCUUGGCUA |
| siRNA 2496 | 2496 | AGCCAAGAUGGUGUGUGGG | 5520 | CCCACACACCAUCUUGGCU |
| siRNA 2497 | 2497 | GCCAAGAUGGUGUGUGGGC | 5521 | GCCCACACACCAUCUUGGC |
| siRNA 2498 | 2498 | CCAAGAUGGUGUGUGGGCC | 5522 | GGCCCACACACCAUCUUGG |
| siRNA 2499 | 2499 | CAAGAUGGUGUGUGGGCCC | 5523 | GGGCCCACACACCAUCUUG |
| siRNA 2500 | 2500 | AAGAUGGUGUGUGGGCCCU | 5524 | AGGGCCCACACACCAUCUU |
| siRNA 2501 | 2501 | AGAUGGUGUGUGGGCCCUC | 5525 | GAGGGCCCACACACCAUCU |
| siRNA 2502 | 2502 | GAUGGUGUGUGGGCCCUCA | 5526 | UGAGGGCCCACACACCAUC |
| siRNA 2503 | 2503 | AUGGUGUGUGGGCCCUCAG | 5527 | CUGAGGGCCCACACACCAU |
| siRNA 2504 | 2504 | UGGUGUGUGGGCCCUCAGG | 5528 | CCUGAGGGCCCACACACCA |
| siRNA 2505 | 2505 | GGUGUGUGGGCCCUCAGGC | 5529 | GCCUGAGGGCCCACACACC |
| siRNA 2506 | 2506 | GUGUGUGGGCCCUCAGGCU | 5530 | AGCCUGAGGGCCCACACAC |
| siRNA 2507 | 2507 | UGUGUGGGCCCUCAGGCUC | 5531 | GAGCCUGAGGGCCCACACA |
| siRNA 2508 | 2508 | GUGUGGGCCCUCAGGCUCC | 5532 | GGAGCCUGAGGGCCCACAC |
| siRNA 2509 | 2509 | UGUGGGCCCUCAGGCUCCC | 5533 | GGGAGCCUGAGGGCCCACA |
| siRNA 2510 | 2510 | GUGGGCCCUCAGGCUCCCA | 5534 | UGGGAGCCUGAGGGCCCAC |
| siRNA 2511 | 2511 | UGGGCCCUCAGGCUCCCAG | 5535 | CUGGGAGCCUGAGGGCCCA |
| siRNA 2512 | 2512 | GGGCCCUCAGGCUCCCAGC | 5536 | GCUGGGAGCCUGAGGGCCC |
| siRNA 2513 | 2513 | GGCCCUCAGGCUCCCAGCU | 5537 | AGCUGGGAGCCUGAGGGCC |
| siRNA 2514 | 2514 | GCCCUCAGGCUCCCAGCUU | 5538 | AAGCUGGGAGCCUGAGGGC |
| siRNA 2515 | 2515 | CCCUCAGGCUCCCAGCUUG | 5539 | CAAGCUGGGAGCCUGAGGG |
| siRNA 2516 | 2516 | CCUCAGGCUCCCAGCUUGU | 5540 | ACAAGCUGGGAGCCUGAGG |
| siRNA 2517 | 2517 | CUCAGGCUCCCAGCUUGUC | 5541 | GACAAGCUGGGAGCCUGAG |
| siRNA 2518 | 2518 | UCAGGCUCCCAGCUUGUCC | 5542 | GGACAAGCUGGGAGCCUGA |
| siRNA 2519 | 2519 | CAGGCUCCCAGCUUGUCCU | 5543 | AGGACAAGCUGGGAGCCUG |
| siRNA 2520 | 2520 | AGGCUCCCAGCUUGUCCUG | 5544 | CAGGACAAGCUGGGAGCCU |
| siRNA 2521 | 2521 | GGCUCCCAGCUUGUCCUGC | 5545 | GCAGGACAAGCUGGGAGCC |
| siRNA 2522 | 2522 | GCUCCCAGCUUGUCCUGCU | 5546 | AGCAGGACAAGCUGGGAGC |
| siRNA 2523 | 2523 | CUCCCAGCUUGUCCUGCUC | 5547 | GAGCAGGACAAGCUGGGAG |
| siRNA 2524 | 2524 | UCCCAGCUUGUCCUGCUCA | 5548 | UGAGCAGGACAAGCUGGGA |
| siRNA 2525 | 2525 | CCCAGCUUGUCCUGCUCAA | 5549 | UUGAGCAGGACAAGCUGGG |
| siRNA 2526 | 2526 | CCAGCUUGUCCUGCUCAAG | 5550 | CUUGAGCAGGACAAGCUGG |
| siRNA 2527 | 2527 | CAGCUUGUCCUGCUCAAGC | 5551 | GCUUGAGCAGGACAAGCUG |
| siRNA 2528 | 2528 | AGCUUGUCCUGCUCAAGCU | 5552 | AGCUUGAGCAGGACAAGCU |
| siRNA 2529 | 2529 | GCUUGUCCUGCUCAAGCUG | 5553 | CAGCUUGAGCAGGACAAGC |
| siRNA 2530 | 2530 | CUUGUCCUGCUCAAGCUGG | 5554 | CCAGCUUGAGCAGGACAAG |
| siRNA 2531 | 2531 | UUGUCCUGCUCAAGCUGGA | 5555 | UCCAGCUUGAGCAGGACAA |
| siRNA 2532 | 2532 | UGUCCUGCUCAAGCUGGAG | 5556 | CUCCAGCUUGAGCAGGACA |
| siRNA 2533 | 2533 | GUCCUGCUCAAGCUGGAGA | 5557 | UCUCCAGCUUGAGCAGGAC |
| siRNA 2534 | 2534 | UCCUGCUCAAGCUGGAGAG | 5558 | CUCUCCAGCUUGAGCAGGA |
| siRNA 2535 | 2535 | CCUGCUCAAGCUGGAGAGA | 5559 | UCUCUCCAGCUUGAGCAGG |
| siRNA 2536 | 2536 | CUGCUCAAGCUGGAGAGAU | 5560 | AUCUCUCCAGCUUGAGCAG |
| siRNA 2537 | 2537 | UGCUCAAGCUGGAGAGAUC | 5561 | GAUCUCUCCAGCUUGAGCA |
| siRNA 2538 | 2538 | GCUCAAGCUGGAGAGAUCU | 5562 | AGAUCUCUCCAGCUUGAGC |
| siRNA 2539 | 2539 | CUCAAGCUGGAGAGAUCUG | 5563 | CAGAUCUCUCCAGCUUGAG |
| siRNA 2540 | 2540 | UCAAGCUGGAGAGAUCUGU | 5564 | ACAGAUCUCUCCAGCUUGA |
| siRNA 2541 | 2541 | CAAGCUGGAGAGAUCUGUG | 5565 | CACAGAUCUCUCCAGCUUG |
| siRNA 2542 | 2542 | AAGCUGGAGAGAUCUGUGA | 5566 | UCACAGAUCUCUCCAGCUU |
| siRNA 2543 | 2543 | AGCUGGAGAGAUCUGUGAC | 5567 | GUCACAGAUCUCUCCAGCU |
| siRNA 2544 | 2544 | GCUGGAGAGAUCUGUGACC | 5568 | GGUCACAGAUCUCUCCAGC |
| siRNA 2545 | 2545 | CUGGAGAGAUCUGUGACCC | 5569 | GGGUCACAGAUCUCUCCAG |
| siRNA 2546 | 2546 | UGGAGAGAUCUGUGACCCU | 5570 | AGGGUCACAGAUCUCUCCA |
| siRNA 2547 | 2547 | GGAGAGAUCUGUGACCCUG | 5571 | CAGGGUCACAGAUCUCUCC |
| siRNA 2548 | 2548 | GAGAGAUCUGUGACCCUGA | 5572 | UCAGGGUCACAGAUCUCUC |
| siRNA 2549 | 2549 | AGAGAUCUGUGACCCUGAA | 5573 | UUCAGGGUCACAGAUCUCU |
| siRNA 2550 | 2550 | GAGAUCUGUGACCCUGAAC | 5574 | GUUCAGGGUCACAGAUCUC |
| siRNA 2551 | 2551 | AGAUCUGUGACCCUGAACC | 5575 | GGUUCAGGGUCACAGAUCU |
| siRNA 2552 | 2552 | GAUCUGUGACCCUGAACCA | 5576 | UGGUUCAGGGUCACAGAUC |
| siRNA 2553 | 2553 | AUCUGUGACCCUGAACCAG | 5577 | CUGGUUCAGGGUCACAGAU |
| siRNA 2554 | 2554 | UCUGUGACCCUGAACCAGC | 5578 | GCUGGUUCAGGGUCACAGA |
| siRNA 2555 | 2555 | CUGUGACCCUGAACCAGCG | 5579 | CGCUGGUUCAGGGUCACAG |
| siRNA 2556 | 2556 | UGUGACCCUGAACCAGCGU | 5580 | ACGCUGGUUCAGGGUCACA |
| siRNA 2557 | 2557 | GUGACCCUGAACCAGCGUG | 5581 | CACGCUGGUUCAGGGUCAC |
| siRNA 2558 | 2558 | UGACCCUGAACCAGCGUGU | 5582 | ACACGCUGGUUCAGGGUCA |
| siRNA 2559 | 2559 | GACCCUGAACCAGCGUGUG | 5583 | CACACGCUGGUUCAGGGUC |
| siRNA 2560 | 2560 | ACCCUGAACCAGCGUGUGG | 5584 | CCACACGCUGGUUCAGGGU |
| siRNA 2561 | 2561 | CCCUGAACCAGCGUGUGGC | 5585 | GCCACACGCUGGUUCAGGG |
| siRNA 2562 | 2562 | CCUGAACCAGCGUGUGGCC | 5586 | GGCCACACGCUGGUUCAGG |
| siRNA 2563 | 2563 | CUGAACCAGCGUGUGGCCC | 5587 | GGGCCACACGCUGGUUCAG |
| siRNA 2564 | 2564 | UGAACCAGCGUGUGGCCCU | 5588 | AGGGCCACACGCUGGUUCA |
| siRNA 2565 | 2565 | GAACCAGCGUGUGGCCCUG | 5589 | CAGGGCCACACGCUGGUUC |
| siRNA 2566 | 2566 | AACCAGCGUGUGGCCCUGA | 5590 | UCAGGGCCACACGCUGGUU |
| siRNA 2567 | 2567 | ACCAGCGUGUGGCCCUGAU | 5591 | AUCAGGGCCACACGCUGGU |
| siRNA 2568 | 2568 | CCAGCGUGUGGCCCUGAUC | 5592 | GAUCAGGGCCACACGCUGG |
| siRNA 2569 | 2569 | CAGCGUGUGGCCCUGAUCU | 5593 | AGAUCAGGGCCACACGCUG |
| siRNA 2570 | 2570 | AGCGUGUGGCCCUGAUCUG | 5594 | CAGAUCAGGGCCACACGCU |
| siRNA 2571 | 2571 | GCGUGUGGCCCUGAUCUGC | 5595 | GCAGAUCAGGGCCACACGC |
| siRNA 2572 | 2572 | CGUGUGGCCCUGAUCUGCC | 5596 | GGCAGAUCAGGGCCACACG |
| siRNA 2573 | 2573 | GUGUGGCCCUGAUCUGCCU | 5597 | AGGCAGAUCAGGGCCACAC |
| siRNA 2574 | 2574 | UGUGGCCCUGAUCUGCCUG | 5598 | CAGGCAGAUCAGGGCCACA |
| siRNA 2575 | 2575 | GUGGCCCUGAUCUGCCUGC | 5599 | GCAGGCAGAUCAGGGCCAC |
| siRNA 2576 | 2576 | UGGCCCUGAUCUGCCUGCC | 5600 | GGCAGGCAGAUCAGGGCCA |
| siRNA 2577 | 2577 | GGCCCUGAUCUGCCUGCCC | 5601 | GGGCAGGCAGAUCAGGGCC |
| siRNA 2578 | 2578 | GCCCUGAUCUGCCUGCCCC | 5602 | GGGGCAGGCAGAUCAGGGC |
| siRNA 2579 | 2579 | CCCUGAUCUGCCUGCCCCC | 5603 | GGGGGCAGGCAGAUCAGGG |
| siRNA 2580 | 2580 | CCUGAUCUGCCUGCCCCCU | 5604 | AGGGGGCAGGCAGAUCAGG |
| siRNA 2581 | 2581 | CUGAUCUGCCUGCCCCCUG | 5605 | CAGGGGGCAGGCAGAUCAG |
| siRNA 2582 | 2582 | UGAUCUGCCUGCCCCCUGA | 5606 | UCAGGGGGCAGGCAGAUCA |
| siRNA 2583 | 2583 | GAUCUGCCUGCCCCCUGAA | 5607 | UUCAGGGGGCAGGCAGAUC |
| siRNA 2584 | 2584 | AUCUGCCUGCCCCCUGAAU | 5608 | AUUCAGGGGGCAGGCAGAU |
| siRNA 2585 | 2585 | UCUGCCUGCCCCCUGAAUG | 5609 | CAUUCAGGGGGCAGGCAGA |
| siRNA 2586 | 2586 | CUGCCUGCCCCCUGAAUGG | 5610 | CCAUUCAGGGGGCAGGCAG |
| siRNA 2587 | 2587 | UGCCUGCCCCCUGAAUGGU | 5611 | ACCAUUCAGGGGGCAGGCA |
| siRNA 2588 | 2588 | GCCUGCCCCCUGAAUGGUA | 5612 | UACCAUUCAGGGGGCAGGC |
| siRNA 2589 | 2589 | CCUGCCCCCUGAAUGGUAU | 5613 | AUACCAUUCAGGGGGCAGG |
| siRNA 2590 | 2590 | CUGCCCCCUGAAUGGUAUG | 5614 | CAUACCAUUCAGGGGGCAG |
| siRNA 2591 | 2591 | UGCCCCCUGAAUGGUAUGU | 5615 | ACAUACCAUUCAGGGGGCA |
| siRNA 2592 | 2592 | GCCCCCUGAAUGGUAUGUG | 5616 | CACAUACCAUUCAGGGGGC |
| siRNA 2593 | 2593 | CCCCCUGAAUGGUAUGUGG | 5617 | CCACAUACCAUUCAGGGGG |
| siRNA 2594 | 2594 | CCCCUGAAUGGUAUGUGGU | 5618 | ACCACAUACCAUUCAGGGG |
| siRNA 2595 | 2595 | CCCUGAAUGGUAUGUGGUG | 5619 | CACCACAUACCAUUCAGGG |
| siRNA 2596 | 2596 | CCUGAAUGGUAUGUGGUGC | 5620 | GCACCACAUACCAUUCAGG |
| siRNA 2597 | 2597 | CUGAAUGGUAUGUGGUGCC | 5621 | GGCACCACAUACCAUUCAG |
| siRNA 2598 | 2598 | UGAAUGGUAUGUGGUGCCU | 5622 | AGGCACCACAUACCAUUCA |
| siRNA 2599 | 2599 | GAAUGGUAUGUGGUGCCUC | 5623 | GAGGCACCACAUACCAUUC |
| siRNA 2600 | 2600 | AAUGGUAUGUGGUGCCUCC | 5624 | GGAGGCACCACAUACCAUU |
| siRNA 2601 | 2601 | AUGGUAUGUGGUGCCUCCA | 5625 | UGGAGGCACCACAUACCAU |
| siRNA 2602 | 2602 | UGGUAUGUGGUGCCUCCAG | 5626 | CUGGAGGCACCACAUACCA |
| siRNA 2603 | 2603 | GGUAUGUGGUGCCUCCAGG | 5627 | CCUGGAGGCACCACAUACC |
| siRNA 2604 | 2604 | GUAUGUGGUGCCUCCAGGG | 5628 | CCCUGGAGGCACCACAUAC |
| siRNA 2605 | 2605 | UAUGUGGUGCCUCCAGGGA | 5629 | UCCCUGGAGGCACCACAUA |
| siRNA 2606 | 2606 | AUGUGGUGCCUCCAGGGAC | 5630 | GUCCCUGGAGGCACCACAU |
| siRNA 2607 | 2607 | UGUGGUGCCUCCAGGGACC | 5631 | GGUCCCUGGAGGCACCACA |
| siRNA 2608 | 2608 | GUGGUGCCUCCAGGGACCA | 5632 | UGGUCCCUGGAGGCACCAC |
| siRNA 2609 | 2609 | UGGUGCCUCCAGGGACCAA | 5633 | UUGGUCCCUGGAGGCACCA |
| siRNA 2610 | 2610 | GGUGCCUCCAGGGACCAAG | 5634 | CUUGGUCCCUGGAGGCACC |
| siRNA 2611 | 2611 | GUGCCUCCAGGGACCAAGU | 5635 | ACUUGGUCCCUGGAGGCAC |
| siRNA 2612 | 2612 | UGCCUCCAGGGACCAAGUG | 5636 | CACUUGGUCCCUGGAGGCA |
| siRNA 2613 | 2613 | GCCUCCAGGGACCAAGUGU | 5637 | ACACUUGGUCCCUGGAGGC |
| siRNA 2614 | 2614 | CCUCCAGGGACCAAGUGUG | 5638 | CACACUUGGUCCCUGGAGG |
| siRNA 2615 | 2615 | CUCCAGGGACCAAGUGUGA | 5639 | UCACACUUGGUCCCUGGAG |
| siRNA 2616 | 2616 | UCCAGGGACCAAGUGUGAG | 5640 | CUCACACUUGGUCCCUGGA |
| siRNA 2617 | 2617 | CCAGGGACCAAGUGUGAGA | 5641 | UCUCACACUUGGUCCCUGG |
| siRNA 2618 | 2618 | CAGGGACCAAGUGUGAGAU | 5642 | AUCUCACACUUGGUCCCUG |
| siRNA 2619 | 2619 | AGGGACCAAGUGUGAGAUU | 5643 | AAUCUCACACUUGGUCCCU |
| siRNA 2620 | 2620 | GGGACCAAGUGUGAGAUUG | 5644 | CAAUCUCACACUUGGUCCC |
| siRNA 2621 | 2621 | GGACCAAGUGUGAGAUUGC | 5645 | GCAAUCUCACACUUGGUCC |
| siRNA 2622 | 2622 | GACCAAGUGUGAGAUUGCA | 5646 | UGCAAUCUCACACUUGGUC |
| siRNA 2623 | 2623 | ACCAAGUGUGAGAUUGCAG | 5647 | CUGCAAUCUCACACUUGGU |
| siRNA 2624 | 2624 | CCAAGUGUGAGAUUGCAGG | 5648 | CCUGCAAUCUCACACUUGG |
| siRNA 2625 | 2625 | CAAGUGUGAGAUUGCAGGC | 5649 | GCCUGCAAUCUCACACUUG |
| siRNA 2626 | 2626 | AAGUGUGAGAUUGCAGGCU | 5650 | AGCCUGCAAUCUCACACUU |
| siRNA 2627 | 2627 | AGUGUGAGAUUGCAGGCUG | 5651 | CAGCCUGCAAUCUCACACU |
| siRNA 2628 | 2628 | GUGUGAGAUUGCAGGCUGG | 5652 | CCAGCCUGCAAUCUCACAC |
| siRNA 2629 | 2629 | UGUGAGAUUGCAGGCUGGG | 5653 | CCCAGCCUGCAAUCUCACA |
| siRNA 2630 | 2630 | GUGAGAUUGCAGGCUGGGG | 5654 | CCCCAGCCUGCAAUCUCAC |
| siRNA 2631 | 2631 | UGAGAUUGCAGGCUGGGGU | 5655 | ACCCCAGCCUGCAAUCUCA |
| siRNA 2632 | 2632 | GAGAUUGCAGGCUGGGGUG | 5656 | CACCCCAGCCUGCAAUCUC |
| siRNA 2633 | 2633 | AGAUUGCAGGCUGGGGUGA | 5657 | UCACCCCAGCCUGCAAUCU |
| siRNA 2634 | 2634 | GAUUGCAGGCUGGGGUGAG | 5658 | CUCACCCCAGCCUGCAAUC |
| siRNA 2635 | 2635 | AUUGCAGGCUGGGGUGAGA | 5659 | UCUCACCCCAGCCUGCAAU |
| siRNA 2636 | 2636 | UUGCAGGCUGGGGUGAGAC | 5660 | GUCUCACCCCAGCCUGCAA |
| siRNA 2637 | 2637 | UGCAGGCUGGGGUGAGACC | 5661 | GGUCUCACCCCAGCCUGCA |
| siRNA 2638 | 2638 | GCAGGCUGGGGUGAGACCA | 5662 | UGGUCUCACCCCAGCCUGC |
| siRNA 2639 | 2639 | CAGGCUGGGGUGAGACCAA | 5663 | UUGGUCUCACCCCAGCCUG |
| siRNA 2640 | 2640 | AGGCUGGGGUGAGACCAAA | 5664 | UUUGGUCUCACCCCAGCCU |
| siRNA 2641 | 2641 | GGCUGGGGUGAGACCAAAG | 5665 | CUUUGGUCUCACCCCAGCC |
| siRNA 2642 | 2642 | GCUGGGGUGAGACCAAAGG | 5666 | CCUUUGGUCUCACCCCAGC |
| siRNA 2643 | 2643 | CUGGGGUGAGACCAAAGGU | 5667 | ACCUUUGGUCUCACCCCAG |
| siRNA 2644 | 2644 | UGGGGUGAGACCAAAGGUA | 5668 | UACCUUUGGUCUCACCCCA |
| siRNA 2645 | 2645 | GGGGUGAGACCAAAGGUAC | 5669 | GUACCUUUGGUCUCACCCC |
| siRNA 2646 | 2646 | GGGUGAGACCAAAGGUACG | 5670 | CGUACCUUUGGUCUCACCC |
| siRNA 2647 | 2647 | GGUGAGACCAAAGGUACGG | 5671 | CCGUACCUUUGGUCUCACC |
| siRNA 2648 | 2648 | GUGAGACCAAAGGUACGGG | 5672 | CCCGUACCUUUGGUCUCAC |
| siRNA 2649 | 2649 | UGAGACCAAAGGUACGGGU | 5673 | ACCCGUACCUUUGGUCUCA |
| siRNA 2650 | 2650 | GAGACCAAAGGUACGGGUA | 5674 | UACCCGUACCUUUGGUCUC |
| siRNA 2651 | 2651 | AGACCAAAGGUACGGGUAA | 5675 | UUACCCGUACCUUUGGUCU |
| siRNA 2652 | 2652 | GACCAAAGGUACGGGUAAU | 5676 | AUUACCCGUACCUUUGGUC |
| siRNA 2653 | 2653 | ACCAAAGGUACGGGUAAUG | 5677 | CAUUACCCGUACCUUUGGU |
| siRNA 2654 | 2654 | CCAAAGGUACGGGUAAUGA | 5678 | UCAUUACCCGUACCUUUGG |
| siRNA 2655 | 2655 | CAAAGGUACGGGUAAUGAC | 5679 | GUCAUUACCCGUACCUUUG |
| siRNA 2656 | 2656 | AAAGGUACGGGUAAUGACA | 5680 | UGUCAUUACCCGUACCUUU |
| siRNA 2657 | 2657 | AAGGUACGGGUAAUGACAC | 5681 | GUGUCAUUACCCGUACCUU |
| siRNA 2658 | 2658 | AGGUACGGGUAAUGACACA | 5682 | UGUGUCAUUACCCGUACCU |
| siRNA 2659 | 2659 | GGUACGGGUAAUGACACAG | 5683 | CUGUGUCAUUACCCGUACC |
| siRNA 2660 | 2660 | GUACGGGUAAUGACACAGU | 5684 | ACUGUGUCAUUACCCGUAC |
| siRNA 2661 | 2661 | UACGGGUAAUGACACAGUC | 5685 | GACUGUGUCAUUACCCGUA |
| siRNA 2662 | 2662 | ACGGGUAAUGACACAGUCC | 5686 | GGACUGUGUCAUUACCCGU |
| siRNA 2663 | 2663 | CGGGUAAUGACACAGUCCU | 5687 | AGGACUGUGUCAUUACCCG |
| siRNA 2664 | 2664 | GGGUAAUGACACAGUCCUA | 5688 | UAGGACUGUGUCAUUACCC |
| siRNA 2665 | 2665 | GGUAAUGACACAGUCCUAA | 5689 | UUAGGACUGUGUCAUUACC |
| siRNA 2666 | 2666 | GUAAUGACACAGUCCUAAA | 5690 | UUUAGGACUGUGUCAUUAC |
| siRNA 2667 | 2667 | UAAUGACACAGUCCUAAAU | 5691 | AUUUAGGACUGUGUCAUUA |
| siRNA 2668 | 2668 | AAUGACACAGUCCUAAAUG | 5692 | CAUUUAGGACUGUGUCAUU |
| siRNA 2669 | 2669 | AUGACACAGUCCUAAAUGU | 5693 | ACAUUUAGGACUGUGUCAU |
| siRNA 2670 | 2670 | UGACACAGUCCUAAAUGUG | 5694 | CACAUUUAGGACUGUGUCA |
| siRNA 2671 | 2671 | GACACAGUCCUAAAUGUGG | 5695 | CCACAUUUAGGACUGUGUC |
| siRNA 2672 | 2672 | ACACAGUCCUAAAUGUGGC | 5696 | GCCACAUUUAGGACUGUGU |
| siRNA 2673 | 2673 | CACAGUCCUAAAUGUGGCC | 5697 | GGCCACAUUUAGGACUGUG |
| siRNA 2674 | 2674 | ACAGUCCUAAAUGUGGCCU | 5698 | AGGCCACAUUUAGGACUGU |
| siRNA 2675 | 2675 | CAGUCCUAAAUGUGGCCUU | 5699 | AAGGCCACAUUUAGGACUG |
| siRNA 2676 | 2676 | AGUCCUAAAUGUGGCCUUG | 5700 | CAAGGCCACAUUUAGGACU |
| siRNA 2677 | 2677 | GUCCUAAAUGUGGCCUUGC | 5701 | GCAAGGCCACAUUUAGGAC |
| siRNA 2678 | 2678 | UCCUAAAUGUGGCCUUGCU | 5702 | AGCAAGGCCACAUUUAGGA |
| siRNA 2679 | 2679 | CCUAAAUGUGGCCUUGCUG | 5703 | CAGCAAGGCCACAUUUAGG |
| siRNA 2680 | 2680 | CUAAAUGUGGCCUUGCUGA | 5704 | UCAGCAAGGCCACAUUUAG |
| siRNA 2681 | 2681 | UAAAUGUGGCCUUGCUGAA | 5705 | UUCAGCAAGGCCACAUUUA |
| siRNA 2682 | 2682 | AAAUGUGGCCUUGCUGAAU | 5706 | AUUCAGCAAGGCCACAUUU |
| siRNA 2683 | 2683 | AAUGUGGCCUUGCUGAAUG | 5707 | CAUUCAGCAAGGCCACAUU |
| siRNA 2684 | 2684 | AUGUGGCCUUGCUGAAUGU | 5708 | ACAUUCAGCAAGGCCACAU |
| siRNA 2685 | 2685 | UGUGGCCUUGCUGAAUGUC | 5709 | GACAUUCAGCAAGGCCACA |
| siRNA 2686 | 2686 | GUGGCCUUGCUGAAUGUCA | 5710 | UGACAUUCAGCAAGGCCAC |
| siRNA 2687 | 2687 | UGGCCUUGCUGAAUGUCAU | 5711 | AUGACAUUCAGCAAGGCCA |
| siRNA 2688 | 2688 | GGCCUUGCUGAAUGUCAUC | 5712 | GAUGACAUUCAGCAAGGCC |
| siRNA 2689 | 2689 | GCCUUGCUGAAUGUCAUCU | 5713 | AGAUGACAUUCAGCAAGGC |
| siRNA 2690 | 2690 | CCUUGCUGAAUGUCAUCUC | 5714 | GAGAUGACAUUCAGCAAGG |
| siRNA 2691 | 2691 | CUUGCUGAAUGUCAUCUCC | 5715 | GGAGAUGACAUUCAGCAAG |
| siRNA 2692 | 2692 | UUGCUGAAUGUCAUCUCCA | 5716 | UGGAGAUGACAUUCAGCAA |
| siRNA 2693 | 2693 | UGCUGAAUGUCAUCUCCAA | 5717 | UUGGAGAUGACAUUCAGCA |
| siRNA 2694 | 2694 | GCUGAAUGUCAUCUCCAAC | 5718 | GUUGGAGAUGACAUUCAGC |
| siRNA 2695 | 2695 | CUGAAUGUCAUCUCCAACC | 5719 | GGUUGGAGAUGACAUUCAG |
| siRNA 2696 | 2696 | UGAAUGUCAUCUCCAACCA | 5720 | UGGUUGGAGAUGACAUUCA |
| siRNA 2697 | 2697 | GAAUGUCAUCUCCAACCAG | 5721 | CUGGUUGGAGAUGACAUUC |
| siRNA 2698 | 2698 | AAUGUCAUCUCCAACCAGG | 5722 | CCUGGUUGGAGAUGACAUU |
| siRNA 2699 | 2699 | AUGUCAUCUCCAACCAGGA | 5723 | UCCUGGUUGGAGAUGACAU |
| siRNA 2700 | 2700 | UGUCAUCUCCAACCAGGAG | 5724 | CUCCUGGUUGGAGAUGACA |
| siRNA 2701 | 2701 | GUCAUCUCCAACCAGGAGU | 5725 | ACUCCUGGUUGGAGAUGAC |
| siRNA 2702 | 2702 | UCAUCUCCAACCAGGAGUG | 5726 | CACUCCUGGUUGGAGAUGA |
| siRNA 2703 | 2703 | CAUCUCCAACCAGGAGUGU | 5727 | ACACUCCUGGUUGGAGAUG |
| siRNA 2704 | 2704 | AUCUCCAACCAGGAGUGUA | 5728 | UACACUCCUGGUUGGAGAU |
| siRNA 2705 | 2705 | UCUCCAACCAGGAGUGUAA | 5729 | UUACACUCCUGGUUGGAGA |
| siRNA 2706 | 2706 | CUCCAACCAGGAGUGUAAC | 5730 | GUUACACUCCUGGUUGGAG |
| siRNA 2707 | 2707 | UCCAACCAGGAGUGUAACA | 5731 | UGUUACACUCCUGGUUGGA |
| siRNA 2708 | 2708 | CCAACCAGGAGUGUAACAU | 5732 | AUGUUACACUCCUGGUUGG |
| siRNA 2709 | 2709 | CAACCAGGAGUGUAACAUC | 5733 | GAUGUUACACUCCUGGUUG |
| siRNA 2710 | 2710 | AACCAGGAGUGUAACAUCA | 5734 | UGAUGUUACACUCCUGGUU |
| siRNA 2711 | 2711 | ACCAGGAGUGUAACAUCAA | 5735 | UUGAUGUUACACUCCUGGU |
| siRNA 2712 | 2712 | CCAGGAGUGUAACAUCAAG | 5736 | CUUGAUGUUACACUCCUGG |
| siRNA 2713 | 2713 | CAGGAGUGUAACAUCAAGC | 5737 | GCUUGAUGUUACACUCCUG |
| SIRNA 2714 | 2714 | AGGAGUGUAACAUCAAGCA | 5738 | UGCUUGAUGUUACACUCCU |
| siRNA 2715 | 2715 | GGAGUGUAACAUCAAGCAC | 5739 | GUGCUUGAUGUUACACUCC |
| siRNA 2716 | 2716 | GAGUGUAACAUCAAGCACC | 5740 | GGUGCUUGAUGUUACACUC |
| siRNA 2717 | 2717 | AGUGUAACAUCAAGCACCG | 5741 | CGGUGCUUGAUGUUACACU |
| siRNA 2718 | 2718 | GUGUAACAUCAAGCACCGA | 5742 | UCGGUGCUUGAUGUUACAC |
| siRNA 2719 | 2719 | UGUAACAUCAAGCACCGAG | 5743 | CUCGGUGCUUGAUGUUACA |
| siRNA 2720 | 2720 | GUAACAUCAAGCACCGAGG | 5744 | CCUCGGUGCUUGAUGUUAC |
| siRNA 2721 | 2721 | UAACAUCAAGCACCGAGGA | 5745 | UCCUCGGUGCUUGAUGUUA |
| siRNA 2722 | 2722 | AACAUCAAGCACCGAGGAC | 5746 | GUCCUCGGUGCUUGAUGUU |
| siRNA 2723 | 2723 | ACAUCAAGCACCGAGGACG | 5747 | CGUCCUCGGUGCUUGAUGU |
| siRNA 2724 | 2724 | CAUCAAGCACCGAGGACGU | 5748 | ACGUCCUCGGUGCUUGAUG |
| siRNA 2725 | 2725 | AUCAAGCACCGAGGACGUG | 5749 | CACGUCCUCGGUGCUUGAU |
| siRNA 2726 | 2726 | UCAAGCACCGAGGACGUGU | 5750 | ACACGUCCUCGGUGCUUGA |
| siRNA 2727 | 2727 | CAAGCACCGAGGACGUGUG | 5751 | CACACGUCCUCGGUGCUUG |
| siRNA 2728 | 2728 | AAGCACCGAGGACGUGUGC | 5752 | GCACACGUCCUCGGUGCUU |
| siRNA 2729 | 2729 | AGCACCGAGGACGUGUGCG | 5753 | CGCACACGUCCUCGGUGCU |
| siRNA 2730 | 2730 | GCACCGAGGACGUGUGCGG | 5754 | CCGCACACGUCCUCGGUGC |
| siRNA 2731 | 2731 | CACCGAGGACGUGUGCGGG | 5755 | CCCGCACACGUCCUCGGUG |
| siRNA 2732 | 2732 | ACCGAGGACGUGUGCGGGA | 5756 | UCCCGCACACGUCCUCGGU |
| siRNA 2733 | 2733 | CCGAGGACGUGUGCGGGAG | 5757 | CUCCCGCACACGUCCUCGG |
| siRNA 2734 | 2734 | CGAGGACGUGUGCGGGAGA | 5758 | UCUCCCGCACACGUCCUCG |
| siRNA 2735 | 2735 | GAGGACGUGUGCGGGAGAG | 5759 | CUCUCCCGCACACGUCCUC |
| siRNA 2736 | 2736 | AGGACGUGUGCGGGAGAGU | 5760 | ACUCUCCCGCACACGUCCU |
| siRNA 2737 | 2737 | GGACGUGUGCGGGAGAGUG | 5761 | CACUCUCCCGCACACGUCC |
| siRNA 2738 | 2738 | GACGUGUGCGGGAGAGUGA | 5762 | UCACUCUCCCGCACACGUC |
| siRNA 2739 | 2739 | ACGUGUGCGGGAGAGUGAG | 5763 | CUCACUCUCCCGCACACGU |
| siRNA 2740 | 2740 | CGUGUGCGGGAGAGUGAGA | 5764 | UCUCACUCUCCCGCACACG |
| siRNA 2741 | 2741 | GUGUGCGGGAGAGUGAGAU | 5765 | AUCUCACUCUCCCGCACAC |
| siRNA 2742 | 2742 | UGUGCGGGAGAGUGAGAUG | 5766 | CAUCUCACUCUCCCGCACA |
| siRNA 2743 | 2743 | GUGCGGGAGAGUGAGAUGU | 5767 | ACAUCUCACUCUCCCGCAC |
| siRNA 2744 | 2744 | UGCGGGAGAGUGAGAUGUG | 5768 | CACAUCUCACUCUCCCGCA |
| siRNA 2745 | 2745 | GCGGGAGAGUGAGAUGUGC | 5769 | GCACAUCUCACUCUCCCGC |
| siRNA 2746 | 2746 | CGGGAGAGUGAGAUGUGCA | 5770 | UGCACAUCUCACUCUCCCG |
| siRNA 2747 | 2747 | GGGAGAGUGAGAUGUGCAC | 5771 | GUGCACAUCUCACUCUCCC |
| siRNA 2748 | 2748 | GGAGAGUGAGAUGUGCACU | 5772 | AGUGCACAUCUCACUCUCC |
| siRNA 2749 | 2749 | GAGAGUGAGAUGUGCACUG | 5773 | CAGUGCACAUCUCACUCUC |
| siRNA 2750 | 2750 | AGAGUGAGAUGUGCACUGA | 5774 | UCAGUGCACAUCUCACUCU |
| siRNA 2751 | 2751 | GAGUGAGAUGUGCACUGAG | 5775 | CUCAGUGCACAUCUCACUC |
| siRNA 2752 | 2752 | AGUGAGAUGUGCACUGAGG | 5776 | CCUCAGUGCACAUCUCACU |
| siRNA 2753 | 2753 | GUGAGAUGUGCACUGAGGG | 5777 | CCCUCAGUGCACAUCUCAC |
| siRNA 2754 | 2754 | UGAGAUGUGCACUGAGGGA | 5778 | UCCCUCAGUGCACAUCUCA |
| siRNA 2755 | 2755 | GAGAUGUGCACUGAGGGAC | 5779 | GUCCCUCAGUGCACAUCUC |
| siRNA 2756 | 2756 | AGAUGUGCACUGAGGGACU | 5780 | AGUCCCUCAGUGCACAUCU |
| siRNA 2757 | 2757 | GAUGUGCACUGAGGGACUG | 5781 | CAGUCCCUCAGUGCACAUC |
| siRNA 2758 | 2758 | AUGUGCACUGAGGGACUGU | 5782 | ACAGUCCCUCAGUGCACAU |
| siRNA 2759 | 2759 | UGUGCACUGAGGGACUGUU | 5783 | AACAGUCCCUCAGUGCACA |
| siRNA 2760 | 2760 | GUGCACUGAGGGACUGUUG | 5784 | CAACAGUCCCUCAGUGCAC |
| siRNA 2761 | 2761 | UGCACUGAGGGACUGUUGG | 5785 | CCAACAGUCCCUCAGUGCA |
| siRNA 2762 | 2762 | GCACUGAGGGACUGUUGGC | 5786 | GCCAACAGUCCCUCAGUGC |
| siRNA 2763 | 2763 | CACUGAGGGACUGUUGGCC | 5787 | GGCCAACAGUCCCUCAGUG |
| siRNA 2764 | 2764 | ACUGAGGGACUGUUGGCCC | 5788 | GGGCCAACAGUCCCUCAGU |
| siRNA 2765 | 2765 | CUGAGGGACUGUUGGCCCC | 5789 | GGGGCCAACAGUCCCUCAG |
| siRNA 2766 | 2766 | UGAGGGACUGUUGGCCCCU | 5790 | AGGGGCCAACAGUCCCUCA |
| siRNA 2767 | 2767 | GAGGGACUGUUGGCCCCUG | 5791 | CAGGGGCCAACAGUCCCUC |
| siRNA 2768 | 2768 | AGGGACUGUUGGCCCCUGU | 5792 | ACAGGGGCCAACAGUCCCU |
| siRNA 2769 | 2769 | GGGACUGUUGGCCCCUGUG | 5793 | CACAGGGGCCAACAGUCCC |
| siRNA 2770 | 2770 | GGACUGUUGGCCCCUGUGG | 5794 | CCACAGGGGCCAACAGUCC |
| siRNA 2771 | 2771 | GACUGUUGGCCCCUGUGGG | 5795 | CCCACAGGGGCCAACAGUC |
| siRNA 2772 | 2772 | ACUGUUGGCCCCUGUGGGG | 5796 | CCCCACAGGGGCCAACAGU |
| siRNA 2773 | 2773 | CUGUUGGCCCCUGUGGGGG | 5797 | CCCCCACAGGGGCCAACAG |
| siRNA 2774 | 2774 | UGUUGGCCCCUGUGGGGGC | 5798 | GCCCCCACAGGGGCCAACA |
| siRNA 2775 | 2775 | GUUGGCCCCUGUGGGGGCC | 5799 | GGCCCCCACAGGGGCCAAC |
| siRNA 2776 | 2776 | UUGGCCCCUGUGGGGGCCU | 5800 | AGGCCCCCACAGGGGCCAA |
| siRNA 2777 | 2777 | UGGCCCCUGUGGGGGCCUG | 5801 | CAGGCCCCCACAGGGGCCA |
| siRNA 2778 | 2778 | GGCCCCUGUGGGGGCCUGU | 5802 | ACAGGCCCCCACAGGGGCC |
| siRNA 2779 | 2779 | GCCCCUGUGGGGGCCUGUG | 5803 | CACAGGCCCCCACAGGGGC |
| siRNA 2780 | 2780 | CCCCUGUGGGGGCCUGUGA | 5804 | UCACAGGCCCCCACAGGGG |
| SIRNA 2781 | 2781 | CCCUGUGGGGGCCUGUGAG | 5805 | CUCACAGGCCCCCACAGGG |
| siRNA 2782 | 2782 | CCUGUGGGGGCCUGUGAGG | 5806 | CCUCACAGGCCCCCACAGG |
| siRNA 2783 | 2783 | CUGUGGGGGCCUGUGAGGG | 5807 | CCCUCACAGGCCCCCACAG |
| siRNA 2784 | 2784 | UGUGGGGGCCUGUGAGGGU | 5808 | ACCCUCACAGGCCCCCACA |
| siRNA 2785 | 2785 | GUGGGGGCCUGUGAGGGUG | 5809 | CACCCUCACAGGCCCCCAC |
| siRNA 2786 | 2786 | UGGGGGCCUGUGAGGGUGA | 5810 | UCACCCUCACAGGCCCCCA |
| siRNA 2787 | 2787 | GGGGGCCUGUGAGGGUGAC | 5811 | GUCACCCUCACAGGCCCCC |
| siRNA 2788 | 2788 | GGGGCCUGUGAGGGUGACU | 5812 | AGUCACCCUCACAGGCCCC |
| siRNA 2789 | 2789 | GGGCCUGUGAGGGUGACUA | 5813 | UAGUCACCCUCACAGGCCC |
| siRNA 2790 | 2790 | GGCCUGUGAGGGUGACUAC | 5814 | GUAGUCACCCUCACAGGCC |
| siRNA 2791 | 2791 | GCCUGUGAGGGUGACUACG | 5815 | CGUAGUCACCCUCACAGGC |
| siRNA 2792 | 2792 | CCUGUGAGGGUGACUACGG | 5816 | CCGUAGUCACCCUCACAGG |
| siRNA 2793 | 2793 | CUGUGAGGGUGACUACGGG | 5817 | CCCGUAGUCACCCUCACAG |
| siRNA 2794 | 2794 | UGUGAGGGUGACUACGGGG | 5818 | CCCCGUAGUCACCCUCACA |
| siRNA 2795 | 2795 | GUGAGGGUGACUACGGGGG | 5819 | CCCCCGUAGUCACCCUCAC |
| siRNA 2796 | 2796 | UGAGGGUGACUACGGGGGC | 5820 | GCCCCCGUAGUCACCCUCA |
| siRNA 2797 | 2797 | GAGGGUGACUACGGGGGCC | 5821 | GGCCCCCGUAGUCACCCUC |
| siRNA 2798 | 2798 | AGGGUGACUACGGGGGCCC | 5822 | GGGCCCCCGUAGUCACCCU |
| siRNA 2799 | 2799 | GGGUGACUACGGGGGCCCA | 5823 | UGGGCCCCCGUAGUCACCC |
| siRNA 2800 | 2800 | GGUGACUACGGGGGCCCAC | 5824 | GUGGGCCCCCGUAGUCACC |
| siRNA 2801 | 2801 | GUGACUACGGGGGCCCACU | 5825 | AGUGGGCCCCCGUAGUCAC |
| siRNA 2802 | 2802 | UGACUACGGGGGCCCACUU | 5826 | AAGUGGGCCCCCGUAGUCA |
| siRNA 2803 | 2803 | GACUACGGGGGCCCACUUG | 5827 | CAAGUGGGCCCCCGUAGUC |
| siRNA 2804 | 2804 | ACUACGGGGGCCCACUUGC | 5828 | GCAAGUGGGCCCCCGUAGU |
| siRNA 2805 | 2805 | CUACGGGGGCCCACUUGCC | 5829 | GGCAAGUGGGCCCCCGUAG |
| siRNA 2806 | 2806 | UACGGGGGCCCACUUGCCU | 5830 | AGGCAAGUGGGCCCCCGUA |
| siRNA 2807 | 2807 | ACGGGGGCCCACUUGCCUG | 5831 | CAGGCAAGUGGGCCCCCGU |
| siRNA 2808 | 2808 | CGGGGGCCCACUUGCCUGC | 5832 | GCAGGCAAGUGGGCCCCCG |
| siRNA 2809 | 2809 | GGGGGCCCACUUGCCUGCU | 5833 | AGCAGGCAAGUGGGCCCCC |
| siRNA 2810 | 2810 | GGGGCCCACUUGCCUGCUU | 5834 | AAGCAGGCAAGUGGGCCCC |
| siRNA 2811 | 2811 | GGGCCCACUUGCCUGCUUU | 5835 | AAAGCAGGCAAGUGGGCCC |
| siRNA 2812 | 2812 | GGCCCACUUGCCUGCUUUA | 5836 | UAAAGCAGGCAAGUGGGCC |
| siRNA 2813 | 2813 | GCCCACUUGCCUGCUUUAC | 5837 | GUAAAGCAGGCAAGUGGGC |
| siRNA 2814 | 2814 | CCCACUUGCCUGCUUUACC | 5838 | GGUAAAGCAGGCAAGUGGG |
| siRNA 2815 | 2815 | CCACUUGCCUGCUUUACCC | 5839 | GGGUAAAGCAGGCAAGUGG |
| siRNA 2816 | 2816 | CACUUGCCUGCUUUACCCA | 5840 | UGGGUAAAGCAGGCAAGUG |
| siRNA 2817 | 2817 | ACUUGCCUGCUUUACCCAC | 5841 | GUGGGUAAAGCAGGCAAGU |
| siRNA 2818 | 2818 | CUUGCCUGCUUUACCCACA | 5842 | UGUGGGUAAAGCAGGCAAG |
| siRNA 2819 | 2819 | UUGCCUGCUUUACCCACAA | 5843 | UUGUGGGUAAAGCAGGCAA |
| siRNA 2820 | 2820 | UGCCUGCUUUACCCACAAC | 5844 | GUUGUGGGUAAAGCAGGCA |
| siRNA 2821 | 2821 | GCCUGCUUUACCCACAACU | 5845 | AGUUGUGGGUAAAGCAGGC |
| siRNA 2822 | 2822 | CCUGCUUUACCCACAACUG | 5846 | CAGUUGUGGGUAAAGCAGG |
| siRNA 2823 | 2823 | CUGCUUUACCCACAACUGC | 5847 | GCAGUUGUGGGUAAAGCAG |
| siRNA 2824 | 2824 | UGCUUUACCCACAACUGCU | 5848 | AGCAGUUGUGGGUAAAGCA |
| siRNA 2825 | 2825 | GCUUUACCCACAACUGCUG | 5849 | CAGCAGUUGUGGGUAAAGC |
| siRNA 2826 | 2826 | CUUUACCCACAACUGCUGG | 5850 | CCAGCAGUUGUGGGUAAAG |
| siRNA 2827 | 2827 | UUUACCCACAACUGCUGGG | 5851 | CCCAGCAGUUGUGGGUAAA |
| siRNA 2828 | 2828 | UUACCCACAACUGCUGGGU | 5852 | ACCCAGCAGUUGUGGGUAA |
| siRNA 2829 | 2829 | UACCCACAACUGCUGGGUC | 5853 | GACCCAGCAGUUGUGGGUA |
| siRNA 2830 | 2830 | ACCCACAACUGCUGGGUCC | 5854 | GGACCCAGCAGUUGUGGGU |
| siRNA 2831 | 2831 | CCCACAACUGCUGGGUCCU | 5855 | AGGACCCAGCAGUUGUGGG |
| siRNA 2832 | 2832 | CCACAACUGCUGGGUCCUG | 5856 | CAGGACCCAGCAGUUGUGG |
| siRNA 2833 | 2833 | CACAACUGCUGGGUCCUGG | 5857 | CCAGGACCCAGCAGUUGUG |
| siRNA 2834 | 2834 | ACAACUGCUGGGUCCUGGA | 5858 | UCCAGGACCCAGCAGUUGU |
| siRNA 2835 | 2835 | CAACUGCUGGGUCCUGGAA | 5859 | UUCCAGGACCCAGCAGUUG |
| siRNA 2836 | 2836 | AACUGCUGGGUCCUGGAAG | 5860 | CUUCCAGGACCCAGCAGUU |
| siRNA 2837 | 2837 | ACUGCUGGGUCCUGGAAGG | 5861 | CCUUCCAGGACCCAGCAGU |
| siRNA 2838 | 2838 | CUGCUGGGUCCUGGAAGGA | 5862 | UCCUUCCAGGACCCAGCAG |
| siRNA 2839 | 2839 | UGCUGGGUCCUGGAAGGAA | 5863 | UUCCUUCCAGGACCCAGCA |
| siRNA 2840 | 2840 | GCUGGGUCCUGGAAGGAAU | 5864 | AUUCCUUCCAGGACCCAGC |
| siRNA 2841 | 2841 | CUGGGUCCUGGAAGGAAUU | 5865 | AAUUCCUUCCAGGACCCAG |
| siRNA 2842 | 2842 | UGGGUCCUGGAAGGAAUUA | 5866 | UAAUUCCUUCCAGGACCCA |
| siRNA 2843 | 2843 | GGGUCCUGGAAGGAAUUAU | 5867 | AUAAUUCCUUCCAGGACCC |
| siRNA 2844 | 2844 | GGUCCUGGAAGGAAUUAUA | 5868 | UAUAAUUCCUUCCAGGACC |
| siRNA 2845 | 2845 | GUCCUGGAAGGAAUUAUAA | 5869 | UUAUAAUUCCUUCCAGGAC |
| siRNA 2846 | 2846 | UCCUGGAAGGAAUUAUAAU | 5870 | AUUAUAAUUCCUUCCAGGA |
| siRNA 2847 | 2847 | CCUGGAAGGAAUUAUAAUC | 5871 | GAUUAUAAUUCCUUCCAGG |
| siRNA 2848 | 2848 | CUGGAAGGAAUUAUAAUCC | 5872 | GGAUUAUAAUUCCUUCCAG |
| siRNA 2849 | 2849 | UGGAAGGAAUUAUAAUCCC | 5873 | GGGAUUAUAAUUCCUUCCA |
| siRNA 2850 | 2850 | GGAAGGAAUUAUAAUCCCC | 5874 | GGGGAUUAUAAUUCCUUCC |
| siRNA 2851 | 2851 | GAAGGAAUUAUAAUCCCCA | 5875 | UGGGGAUUAUAAUUCCUUC |
| siRNA 2852 | 2852 | AAGGAAUUAUAAUCCCCAA | 5876 | UUGGGGAUUAUAAUUCCUU |
| siRNA 2853 | 2853 | AGGAAUUAUAAUCCCCAAC | 5877 | GUUGGGGAUUAUAAUUCCU |
| siRNA 2854 | 2854 | GGAAUUAUAAUCCCCAACC | 5878 | GGUUGGGGAUUAUAAUUCC |
| siRNA 2855 | 2855 | GAAUUAUAAUCCCCAACCG | 5879 | CGGUUGGGGAUUAUAAUUC |
| siRNA 2856 | 2856 | AAUUAUAAUCCCCAACCGA | 5880 | UCGGUUGGGGAUUAUAAUU |
| siRNA 2857 | 2857 | AUUAUAAUCCCCAACCGAG | 5881 | CUCGGUUGGGGAUUAUAAU |
| siRNA 2858 | 2858 | UUAUAAUCCCCAACCGAGU | 5882 | ACUCGGUUGGGGAUUAUAA |
| siRNA 2859 | 2859 | UAUAAUCCCCAACCGAGUA | 5883 | UACUCGGUUGGGGAUUAUA |
| siRNA 2860 | 2860 | AUAAUCCCCAACCGAGUAU | 5884 | AUACUCGGUUGGGGAUUAU |
| siRNA 2861 | 2861 | UAAUCCCCAACCGAGUAUG | 5885 | CAUACUCGGUUGGGGAUUA |
| siRNA 2862 | 2862 | AAUCCCCAACCGAGUAUGC | 5886 | GCAUACUCGGUUGGGGAUU |
| siRNA 2863 | 2863 | AUCCCCAACCGAGUAUGCG | 5887 | CGCAUACUCGGUUGGGGAU |
| siRNA 2864 | 2864 | UCCCCAACCGAGUAUGCGC | 5888 | GCGCAUACUCGGUUGGGGA |
| siRNA 2865 | 2865 | CCCCAACCGAGUAUGCGCA | 5889 | UGCGCAUACUCGGUUGGGG |
| siRNA 2866 | 2866 | CCCAACCGAGUAUGCGCAA | 5890 | UUGCGCAUACUCGGUUGGG |
| siRNA 2867 | 2867 | CCAACCGAGUAUGCGCAAG | 5891 | CUUGCGCAUACUCGGUUGG |
| siRNA 2868 | 2868 | CAACCGAGUAUGCGCAAGG | 5892 | CCUUGCGCAUACUCGGUUG |
| siRNA 2869 | 2869 | AACCGAGUAUGCGCAAGGU | 5893 | ACCUUGCGCAUACUCGGUU |
| siRNA 2870 | 2870 | ACCGAGUAUGCGCAAGGUC | 5894 | GACCUUGCGCAUACUCGGU |
| siRNA 2871 | 2871 | CCGAGUAUGCGCAAGGUCC | 5895 | GGACCUUGCGCAUACUCGG |
| siRNA 2872 | 2872 | CGAGUAUGCGCAAGGUCCC | 5896 | GGGACCUUGCGCAUACUCG |
| siRNA 2873 | 2873 | GAGUAUGCGCAAGGUCCCG | 5897 | CGGGACCUUGCGCAUACUC |
| siRNA 2874 | 2874 | AGUAUGCGCAAGGUCCCGC | 5898 | GCGGGACCUUGCGCAUACU |
| siRNA 2875 | 2875 | GUAUGCGCAAGGUCCCGCU | 5899 | AGCGGGACCUUGCGCAUAC |
| siRNA 2876 | 2876 | UAUGCGCAAGGUCCCGCUG | 5900 | CAGCGGGACCUUGCGCAUA |
| siRNA 2877 | 2877 | AUGCGCAAGGUCCCGCUGG | 5901 | CCAGCGGGACCUUGCGCAU |
| siRNA 2878 | 2878 | UGCGCAAGGUCCCGCUGGC | 5902 | GCCAGCGGGACCUUGCGCA |
| siRNA 2879 | 2879 | GCGCAAGGUCCCGCUGGCC | 5903 | GGCCAGCGGGACCUUGCGC |
| siRNA 2880 | 2880 | CGCAAGGUCCCGCUGGCCA | 5904 | UGGCCAGCGGGACCUUGCG |
| siRNA 2881 | 2881 | GCAAGGUCCCGCUGGCCAG | 5905 | CUGGCCAGCGGGACCUUGC |
| siRNA 2882 | 2882 | CAAGGUCCCGCUGGCCAGC | 5906 | GCUGGCCAGCGGGACCUUG |
| siRNA 2883 | 2883 | AAGGUCCCGCUGGCCAGCU | 5907 | AGCUGGCCAGCGGGACCUU |
| siRNA 2884 | 2884 | AGGUCCCGCUGGCCAGCUG | 5908 | CAGCUGGCCAGCGGGACCU |
| siRNA 2885 | 2885 | GGUCCCGCUGGCCAGCUGU | 5909 | ACAGCUGGCCAGCGGGACC |
| siRNA 2886 | 2886 | GUCCCGCUGGCCAGCUGUC | 5910 | GACAGCUGGCCAGCGGGAC |
| siRNA 2887 | 2887 | UCCCGCUGGCCAGCUGUCU | 5911 | AGACAGCUGGCCAGCGGGA |
| siRNA 2888 | 2888 | CCCGCUGGCCAGCUGUCUU | 5912 | AAGACAGCUGGCCAGCGGG |
| siRNA 2889 | 2889 | CCGCUGGCCAGCUGUCUUC | 5913 | GAAGACAGCUGGCCAGCGG |
| siRNA 2890 | 2890 | CGCUGGCCAGCUGUCUUCA | 5914 | UGAAGACAGCUGGCCAGCG |
| siRNA 2891 | 2891 | GCUGGCCAGCUGUCUUCAC | 5915 | GUGAAGACAGCUGGCCAGC |
| siRNA 2892 | 2892 | CUGGCCAGCUGUCUUCACG | 5916 | CGUGAAGACAGCUGGCCAG |
| siRNA 2893 | 2893 | UGGCCAGCUGUCUUCACGC | 5917 | GCGUGAAGACAGCUGGCCA |
| siRNA 2894 | 2894 | GGCCAGCUGUCUUCACGCG | 5918 | CGCGUGAAGACAGCUGGCC |
| siRNA 2895 | 2895 | GCCAGCUGUCUUCACGCGU | 5919 | ACGCGUGAAGACAGCUGGC |
| siRNA 2896 | 2896 | CCAGCUGUCUUCACGCGUG | 5920 | CACGCGUGAAGACAGCUGG |
| siRNA 2897 | 2897 | CAGCUGUCUUCACGCGUGU | 5921 | ACACGCGUGAAGACAGCUG |
| siRNA 2898 | 2898 | AGCUGUCUUCACGCGUGUC | 5922 | GACACGCGUGAAGACAGCU |
| siRNA 2899 | 2899 | GCUGUCUUCACGCGUGUCU | 5923 | AGACACGCGUGAAGACAGC |
| siRNA 2900 | 2900 | CUGUCUUCACGCGUGUCUC | 5924 | GAGACACGCGUGAAGACAG |
| siRNA 2901 | 2901 | UGUCUUCACGCGUGUCUCU | 5925 | AGAGACACGCGUGAAGACA |
| siRNA 2902 | 2902 | GUCUUCACGCGUGUCUCUG | 5926 | CAGAGACACGCGUGAAGAC |
| siRNA 2903 | 2903 | UCUUCACGCGUGUCUCUGU | 5927 | ACAGAGACACGCGUGAAGA |
| siRNA 2904 | 2904 | CUUCACGCGUGUCUCUGUG | 5928 | CACAGAGACACGCGUGAAG |
| siRNA 2905 | 2905 | UUCACGCGUGUCUCUGUGU | 5929 | ACACAGAGACACGCGUGAA |
| siRNA 2906 | 2906 | UCACGCGUGUCUCUGUGUU | 5930 | AACACAGAGACACGCGUGA |
| siRNA 2907 | 2907 | CACGCGUGUCUCUGUGUUU | 5931 | AAACACAGAGACACGCGUG |
| siRNA 2908 | 2908 | ACGCGUGUCUCUGUGUUUG | 5932 | CAAACACAGAGACACGCGU |
| siRNA 2909 | 2909 | CGCGUGUCUCUGUGUUUGU | 5933 | ACAAACACAGAGACACGCG |
| siRNA 2910 | 2910 | GCGUGUCUCUGUGUUUGUG | 5934 | CACAAACACAGAGACACGC |
| siRNA 2911 | 2911 | CGUGUCUCUGUGUUUGUGG | 5935 | CCACAAACACAGAGACACG |
| siRNA 2912 | 2912 | GUGUCUCUGUGUUUGUGGA | 5936 | UCCACAAACACAGAGACAC |
| siRNA 2913 | 2913 | UGUCUCUGUGUUUGUGGAC | 5937 | GUCCACAAACACAGAGACA |
| siRNA 2914 | 2914 | GUCUCUGUGUUUGUGGACU | 5938 | AGUCCACAAACACAGAGAC |
| siRNA 2915 | 2915 | UCUCUGUGUUUGUGGACUG | 5939 | CAGUCCACAAACACAGAGA |
| siRNA 2916 | 2916 | CUCUGUGUUUGUGGACUGG | 5940 | CCAGUCCACAAACACAGAG |
| siRNA 2917 | 2917 | UCUGUGUUUGUGGACUGGA | 5941 | UCCAGUCCACAAACACAGA |
| siRNA 2918 | 2918 | CUGUGUUUGUGGACUGGAU | 5942 | AUCCAGUCCACAAACACAG |
| siRNA 2919 | 2919 | UGUGUUUGUGGACUGGAUU | 5943 | AAUCCAGUCCACAAACACA |
| siRNA 2920 | 2920 | GUGUUUGUGGACUGGAUUC | 5944 | GAAUCCAGUCCACAAACAC |
| siRNA 2921 | 2921 | UGUUUGUGGACUGGAUUCA | 5945 | UGAAUCCAGUCCACAAACA |
| siRNA 2922 | 2922 | GUUUGUGGACUGGAUUCAC | 5946 | GUGAAUCCAGUCCACAAAC |
| siRNA 2923 | 2923 | UUUGUGGACUGGAUUCACA | 5947 | UGUGAAUCCAGUCCACAAA |
| siRNA 2924 | 2924 | UUGUGGACUGGAUUCACAA | 5948 | UUGUGAAUCCAGUCCACAA |
| siRNA 2925 | 2925 | UGUGGACUGGAUUCACAAG | 5949 | CUUGUGAAUCCAGUCCACA |
| siRNA 2926 | 2926 | GUGGACUGGAUUCACAAGG | 5950 | CCUUGUGAAUCCAGUCCAC |
| siRNA 2927 | 2927 | UGGACUGGAUUCACAAGGU | 5951 | ACCUUGUGAAUCCAGUCCA |
| siRNA 2928 | 2928 | GGACUGGAUUCACAAGGUC | 5952 | GACCUUGUGAAUCCAGUCC |
| siRNA 2929 | 2929 | GACUGGAUUCACAAGGUCA | 5953 | UGACCUUGUGAAUCCAGUC |
| siRNA 2930 | 2930 | ACUGGAUUCACAAGGUCAU | 5954 | AUGACCUUGUGAAUCCAGU |
| siRNA 2931 | 2931 | CUGGAUUCACAAGGUCAUG | 5955 | CAUGACCUUGUGAAUCCAG |
| siRNA 2932 | 2932 | UGGAUUCACAAGGUCAUGA | 5956 | UCAUGACCUUGUGAAUCCA |
| siRNA 2933 | 2933 | GGAUUCACAAGGUCAUGAG | 5957 | CUCAUGACCUUGUGAAUCC |
| siRNA 2934 | 2934 | GAUUCACAAGGUCAUGAGA | 5958 | UCUCAUGACCUUGUGAAUC |
| siRNA 2935 | 2935 | AUUCACAAGGUCAUGAGAC | 5959 | GUCUCAUGACCUUGUGAAU |
| siRNA 2936 | 2936 | UUCACAAGGUCAUGAGACU | 5960 | AGUCUCAUGACCUUGUGAA |
| siRNA 2937 | 2937 | UCACAAGGUCAUGAGACUG | 5961 | CAGUCUCAUGACCUUGUGA |
| siRNA 2938 | 2938 | CACAAGGUCAUGAGACUGG | 5962 | CCAGUCUCAUGACCUUGUG |
| siRNA 2939 | 2939 | ACAAGGUCAUGAGACUGGG | 5963 | CCCAGUCUCAUGACCUUGU |
| siRNA 2940 | 2940 | CAAGGUCAUGAGACUGGGU | 5964 | ACCCAGUCUCAUGACCUUG |
| siRNA 2941 | 2941 | AAGGUCAUGAGACUGGGUU | 5965 | AACCCAGUCUCAUGACCUU |
| siRNA 2942 | 2942 | AGGUCAUGAGACUGGGUUA | 5966 | UAACCCAGUCUCAUGACCU |
| siRNA 2943 | 2943 | GGUCAUGAGACUGGGUUAG | 5967 | CUAACCCAGUCUCAUGACC |
| siRNA 2944 | 2944 | GUCAUGAGACUGGGUUAGG | 5968 | CCUAACCCAGUCUCAUGAC |
| siRNA 2945 | 2945 | UCAUGAGACUGGGUUAGGC | 5969 | GCCUAACCCAGUCUCAUGA |
| siRNA 2946 | 2946 | CAUGAGACUGGGUUAGGCC | 5970 | GGCCUAACCCAGUCUCAUG |
| siRNA 2947 | 2947 | AUGAGACUGGGUUAGGCCC | 5971 | GGGCCUAACCCAGUCUCAU |
| siRNA 2948 | 2948 | UGAGACUGGGUUAGGCCCA | 5972 | UGGGCCUAACCCAGUCUCA |
| siRNA 2949 | 2949 | GAGACUGGGUUAGGCCCAG | 5973 | CUGGGCCUAACCCAGUCUC |
| siRNA 2950 | 2950 | AGACUGGGUUAGGCCCAGC | 5974 | GCUGGGCCUAACCCAGUCU |
| siRNA 2951 | 2951 | GACUGGGUUAGGCCCAGCC | 5975 | GGCUGGGCCUAACCCAGUC |
| siRNA 2952 | 2952 | ACUGGGUUAGGCCCAGCCU | 5976 | AGGCUGGGCCUAACCCAGU |
| siRNA 2953 | 2953 | CUGGGUUAGGCCCAGCCUU | 5977 | AAGGCUGGGCCUAACCCAG |
| siRNA 2954 | 2954 | UGGGUUAGGCCCAGCCUUG | 5978 | CAAGGCUGGGCCUAACCCA |
| siRNA 2955 | 2955 | GGGUUAGGCCCAGCCUUGA | 5979 | UCAAGGCUGGGCCUAACCC |
| siRNA 2956 | 2956 | GGUUAGGCCCAGCCUUGAU | 5980 | AUCAAGGCUGGGCCUAACC |
| siRNA 2957 | 2957 | GUUAGGCCCAGCCUUGAUG | 5981 | CAUCAAGGCUGGGCCUAAC |
| siRNA 2958 | 2958 | UUAGGCCCAGCCUUGAUGC | 5982 | GCAUCAAGGCUGGGCCUAA |
| siRNA 2959 | 2959 | UAGGCCCAGCCUUGAUGCC | 5983 | GGCAUCAAGGCUGGGCCUA |
| siRNA 2960 | 2960 | AGGCCCAGCCUUGAUGCCA | 5984 | UGGCAUCAAGGCUGGGCCU |
| siRNA 2961 | 2961 | GGCCCAGCCUUGAUGCCAU | 5985 | AUGGCAUCAAGGCUGGGCC |
| siRNA 2962 | 2962 | GCCCAGCCUUGAUGCCAUA | 5986 | UAUGGCAUCAAGGCUGGGC |
| siRNA 2963 | 2963 | CCCAGCCUUGAUGCCAUAU | 5987 | AUAUGGCAUCAAGGCUGGG |
| siRNA 2964 | 2964 | CCAGCCUUGAUGCCAUAUG | 5988 | CAUAUGGCAUCAAGGCUGG |
| siRNA 2965 | 2965 | CAGCCUUGAUGCCAUAUGC | 5989 | GCAUAUGGCAUCAAGGCUG |
| siRNA 2966 | 2966 | AGCCUUGAUGCCAUAUGCC | 5990 | GGCAUAUGGCAUCAAGGCU |
| siRNA 2967 | 2967 | GCCUUGAUGCCAUAUGCCU | 5991 | AGGCAUAUGGCAUCAAGGC |
| siRNA 2968 | 2968 | CCUUGAUGCCAUAUGCCUU | 5992 | AAGGCAUAUGGCAUCAAGG |
| siRNA 2969 | 2969 | CUUGAUGCCAUAUGCCUUG | 5993 | CAAGGCAUAUGGCAUCAAG |
| siRNA 2970 | 2970 | UUGAUGCCAUAUGCCUUGG | 5994 | CCAAGGCAUAUGGCAUCAA |
| siRNA 2971 | 2971 | UGAUGCCAUAUGCCUUGGG | 5995 | CCCAAGGCAUAUGGCAUCA |
| siRNA 2972 | 2972 | GAUGCCAUAUGCCUUGGGG | 5996 | CCCCAAGGCAUAUGGCAUC |
| siRNA 2973 | 2973 | AUGCCAUAUGCCUUGGGGA | 5997 | UCCCCAAGGCAUAUGGCAU |
| siRNA 2974 | 2974 | UGCCAUAUGCCUUGGGGAG | 5998 | CUCCCCAAGGCAUAUGGCA |
| siRNA 2975 | 2975 | GCCAUAUGCCUUGGGGAGG | 5999 | CCUCCCCAAGGCAUAUGGC |
| siRNA 2976 | 2976 | CCAUAUGCCUUGGGGAGGA | 6000 | UCCUCCCCAAGGCAUAUGG |
| siRNA 2977 | 2977 | CAUAUGCCUUGGGGAGGAC | 6001 | GUCCUCCCCAAGGCAUAUG |
| siRNA 2978 | 2978 | AUAUGCCUUGGGGAGGACA | 6002 | UGUCCUCCCCAAGGCAUAU |
| siRNA 2979 | 2979 | UAUGCCUUGGGGAGGACAA | 6003 | UUGUCCUCCCCAAGGCAUA |
| siRNA 2980 | 2980 | AUGCCUUGGGGAGGACAAA | 6004 | UUUGUCCUCCCCAAGGCAU |
| siRNA 2981 | 2981 | UGCCUUGGGGAGGACAAAA | 6005 | UUUUGUCCUCCCCAAGGCA |
| siRNA 2982 | 2982 | GCCUUGGGGAGGACAAAAC | 6006 | GUUUUGUCCUCCCCAAGGC |
| siRNA 2983 | 2983 | CCUUGGGGAGGACAAAACU | 6007 | AGUUUUGUCCUCCCCAAGG |
| siRNA 2984 | 2984 | CUUGGGGAGGACAAAACUU | 6008 | AAGUUUUGUCCUCCCCAAG |
| siRNA 2985 | 2985 | UUGGGGAGGACAAAACUUC | 6009 | GAAGUUUUGUCCUCCCCAA |
| siRNA 2986 | 2986 | UGGGGAGGACAAAACUUCU | 6010 | AGAAGUUUUGUCCUCCCCA |
| siRNA 2987 | 2987 | GGGGAGGACAAAACUUCUU | 6011 | AAGAAGUUUUGUCCUCCCC |
| siRNA 2988 | 2988 | GGGAGGACAAAACUUCUUG | 6012 | CAAGAAGUUUUGUCCUCCC |
| siRNA 2989 | 2989 | GGAGGACAAAACUUCUUGU | 6013 | ACAAGAAGUUUUGUCCUCC |
| siRNA 2990 | 2990 | GAGGACAAAACUUCUUGUC | 6014 | GACAAGAAGUUUUGUCCUC |
| siRNA 2991 | 2991 | AGGACAAAACUUCUUGUCA | 6015 | UGACAAGAAGUUUUGUCCU |
| siRNA 2992 | 2992 | GGACAAAACUUCUUGUCAG | 6016 | CUGACAAGAAGUUUUGUCC |
| siRNA 2993 | 2993 | GACAAAACUUCUUGUCAGA | 6017 | UCUGACAAGAAGUUUUGUC |
| siRNA 2994 | 2994 | ACAAAACUUCUUGUCAGAC | 6018 | GUCUGACAAGAAGUUUUGU |
| siRNA 2995 | 2995 | CAAAACUUCUUGUCAGACA | 6019 | UGUCUGACAAGAAGUUUUG |
| siRNA 2996 | 2996 | AAAACUUCUUGUCAGACAU | 6020 | AUGUCUGACAAGAAGUUUU |
| siRNA 2997 | 2997 | AAACUUCUUGUCAGACAUA | 6021 | UAUGUCUGACAAGAAGUUU |
| siRNA 2998 | 2998 | AACUUCUUGUCAGACAUAA | 6022 | UUAUGUCUGACAAGAAGUU |
| siRNA 2999 | 2999 | ACUUCUUGUCAGACAUAAA | 6023 | UUUAUGUCUGACAAGAAGU |
| siRNA 3000 | 3000 | CUUCUUGUCAGACAUAAAG | 6024 | CUUUAUGUCUGACAAGAAG |
| siRNA 3001 | 3001 | UUCUUGUCAGACAUAAAGC | 6025 | GCUUUAUGUCUGACAAGAA |
| siRNA 3002 | 3002 | UCUUGUCAGACAUAAAGCC | 6026 | GGCUUUAUGUCUGACAAGA |
| siRNA 3003 | 3003 | CUUGUCAGACAUAAAGCCA | 6027 | UGGCUUUAUGUCUGACAAG |
| siRNA 3004 | 3004 | UUGUCAGACAUAAAGCCAU | 6028 | AUGGCUUUAUGUCUGACAA |
| siRNA 3005 | 3005 | UGUCAGACAUAAAGCCAUG | 6029 | CAUGGCUUUAUGUCUGACA |
| siRNA 3006 | 3006 | GUCAGACAUAAAGCCAUGU | 6030 | ACAUGGCUUUAUGUCUGAC |
| siRNA 3007 | 3007 | UCAGACAUAAAGCCAUGUU | 6031 | AACAUGGCUUUAUGUCUGA |
| siRNA 3008 | 3008 | CAGACAUAAAGCCAUGUUU | 6032 | AAACAUGGCUUUAUGUCUG |
| siRNA 3009 | 3009 | AGACAUAAAGCCAUGUUUC | 6033 | GAAACAUGGCUUUAUGUCU |
| siRNA 3010 | 3010 | GACAUAAAGCCAUGUUUCC | 6034 | GGAAACAUGGCUUUAUGUC |
| siRNA 3011 | 3011 | ACAUAAAGCCAUGUUUCCU | 6035 | AGGAAACAUGGCUUUAUGU |
| siRNA 3012 | 3012 | CAUAAAGCCAUGUUUCCUC | 6036 | GAGGAAACAUGGCUUUAUG |
| siRNA 3013 | 3013 | AUAAAGCCAUGUUUCCUCU | 6037 | AGAGGAAACAUGGCUUUAU |
| siRNA 3014 | 3014 | UAAAGCCAUGUUUCCUCUU | 6038 | AAGAGGAAACAUGGCUUUA |
| siRNA 3015 | 3015 | AAAGCCAUGUUUCCUCUUU | 6039 | AAAGAGGAAACAUGGCUUU |
| siRNA 3016 | 3016 | AAGCCAUGUUUCCUCUUUA | 6040 | UAAAGAGGAAACAUGGCUU |
| siRNA 3017 | 3017 | AGCCAUGUUUCCUCUUUAU | 6041 | AUAAAGAGGAAACAUGGCU |
| siRNA 3018 | 3018 | GCCAUGUUUCCUCUUUAUG | 6042 | CAUAAAGAGGAAACAUGGC |
| siRNA 3019 | 3019 | CCAUGUUUCCUCUUUAUGC | 6043 | GCAUAAAGAGGAAACAUGG |
| siRNA 3020 | 3020 | CAUGUUUCCUCUUUAUGCC | 6044 | GGCAUAAAGAGGAAACAUG |
| siRNA 3021 | 3021 | AUGUUUCCUCUUUAUGCCU | 6045 | AGGCAUAAAGAGGAAACAU |
| siRNA 3022 | 3022 | UGUUUCCUCUUUAUGCCUG | 6046 | CAGGCAUAAAGAGGAAACA |
| siRNA 3023 | 3023 | GUUUCCUCUUUAUGCCUGU | 6047 | ACAGGCAUAAAGAGGAAAC |
| siRNA 3024 | 3024 | UUUCCUCUUUAUGCCUGUA | 6048 | UACAGGCAUAAAGAGGAAA |

TABLE 33C
Additional Sequences

| SEQ ID | |
|---|---|
| NO: | 5′ to 3′ Sequence |
| 6163 | GAAGCTGGGGCAAGTAATTTTCCCCAATTTACAGGGAAAAACCGAAATTCAGAAAAGTTTAATGTCACCCAGGGGCT |
| | GGAGCCCAGACCTCTGGCAGCTCTCACTTTCACAATGCCCTTGGGCTGACTAGGCTGCAGAGGGGTTTCACCCCAACC |
| | CCAGGGCACCTCAAGTGTCCCCACCAAACCTTCCTAACACCTGTCCACTAAGCTGTACTAGGCCCTTGCAACTGACCT |
| | ATGGGACCTGAGGCCTGGCCCCTCATGGCTCCTGTCACCAGGTCTCAGGTCAGGGTCCAGCAGGCCCTGAGCTGACG |
| | TGTGGAGCCAGAGCCACCCAATCCCGTAGGGACAGGTTTCACAACTTCCCGGATGGGGCTGTGGTGGGTCACAGTGC |
| | AGCCTCCAGCCAGAAGGATGGGGTGGCTCCCACTCCTGCTGCTTCTGACTCAATGCTTAGGGGTCCCTGGGCAGCGCT |
| | CGCCATTGAATGACTTCCAAGTGCTCCGGGGCACAGAGCTACAGCACCTGCTACATGCGGTGGTGCCCGGGCCTTGG |
| | CAGGAGGATGTGGCAGATGCTGAAGAGTGTGCTGGTCGCTGTGGGCCCTTAATGGACTGCCGGGCCTTCCACTACAA |
| | CGTGAGCAGCCATGGTTGCCAACTGCTGCCATGGACTCAACACTCGCCCCACACGAGGCTGCGGCGTTCTGGGCGCT |
| | GTGACCTCTTCCAGAAGAAAGACTACGTACGGACCTGCATCATGAACAATGGGGTTGGGTACCGGGGCACCATGGCC |
| | ACGACCGTGGGTGGCCTGCCCTGCCAGGCTTGGAGCCACAAGTTCCCAAATGATCACAAGTACACGCCCACTCTCCG |
| | GAATGGCCTGGAAGAGAACTTCTGCCGTAACCCTGATGGCGACCCCGGAGGTCCTTGGTGCTACACAACAGACCCTG |
| | CTGTGCGCTTCCAGAGCTGCGGCATCAAATCCTGCCGGGAGGCCGCGTGTGTCTGGTGCAATGGCGAGGAATACCGC |
| | GGCGCGGTAGACCGCACGGAGTCAGGGCGCGAGTGCCAGCGCTGGGATCTTCAGCACCCGCACCAGCACCCCTTCGA |
| | GCCGGGCAAGTTCCTCGACCAAGGTCTGGACGACAACTATTGCCGGAATCCTGACGGCTCCGAGCGGCCATGGTGCT |
| | ACACTACGGATCCGCAGATCGAGCGAGAGTTCTGTGACCTCCCCCGCTGCGGGTCCGAGGCACAGCCCCGCCAAGAG |
| | GCCACAACTGTCAGCTGCTTCCGCGGGAAGGGTGAGGGCTACCGGGGCACAGCCAATACCACCACTGCGGGCGTACC |
| | TTGCCAGCGTTGGGACGCGCAAATCCCGCATCAGCACCGATTTACGCCAGAAAAATACGCGTGCAAAGACCTTCGGG |
| | AGAACTTCTGCCGGAACCCCGACGGCTCAGAGGCGCCCTGGTGCTTCACACTGCGGCCCGGCATGCGCGCGGCCTTTT |
| | GCTACCAGATCCGGCGTTGTACAGACGACGTGCGGCCCCAGGACTGCTACCACGGCGCAGGGGAGCAGTACCGCGGC |
| | ACGGTCAGCAAGACCCGCAAGGGTGTCCAGTGCCAGCGCTGGTCCGCTGAGACGCCGCACAAGCCGCAGTTCACGTT |
| | TACCTCCGAACCGCATGCACAACTGGAGGAGAACTTCTGCCGGAACCCAGATGGGGATAGCCATGGGCCCTGGTGCT |
| | ACACGATGGACCCAAGGACCCCATTCGACTACTGTGCCCTGCGACGCTGCGCTGATGACCAGCCGCCATCAATCCTG |
| | GACCCCCCAGACCAGGTGCAGTTTGAGAAGTGTGGCAAGAGGGTGGATCGGCTGGATCAGCGGCGTTCCAAGCTGCG |
| | CGTGGTTGGGGGCCATCCGGGCAACTCACCCTGGACAGTCAGCTTGCGGAATCGGCAGGGCCAGCATTTCTGCGGGG |
| | GGTCTCTAGTGAAGGAGCAGTGGATACTGACTGCCCGGCAGTGCTTCTCCTCCTGCCATATGCCTCTCACGGGCTATG |
| | AGGTATGGTTGGGCACCCTGTTCCAGAACCCACAGCATGGAGAGCCAAGCCTACAGCGGGTCCCAGTAGCCAAGATG |
| | GTGTGTGGGCCCTCAGGCTCCCAGCTTGTCCTGCTCAAGCTGGAGAGATCTGTGACCCTGAACCAGCGTGTGGCCCTG |
| | ATCTGCCTGCCCCCTGAATGGTATGTGGTGCCTCCAGGGACCAAGTGTGAGATTGCAGGCTGGGGTGAGACCAAAGG |
| | TACGGGTAATGACACAGTCCTAAATGTGGCCTTGCTGAATGTCATCTCCAACCAGGAGTGTAACATCAAGCACCGAG |
| | GACGTGTGCGGGAGAGTGAGATGTGCACTGAGGGACTGTTGGCCCCTGTGGGGGCCTGTGAGGGTGACTACGGGGGC |
| | CCACTTGCCTGCTTTACCCACAACTGCTGGGTCCTGGAAGGAATTATAATCCCCAACCGAGTATGCGCAAGGTCCCGC |
| | TGGCCAGCTGTCTTCACGCGTGTCTCTGTGTTTGTGGACTGGATTCACAAGGTCATGAGACTGGGTTAGGCCCAGCCT |
| | TGATGCCATATGCCTTGGGGAGGACAAAACTTCTTGTCAGACATAAAGCCATGTTTCCTCTTTATGCCTGTA |
| 6185 | CAGCCTCCGCTAGGGGACCCCCTCCATGGCTTCCCACCGGGTTGTTCCAGGCCTCAGCTTCGCCGAAAGGCCTCACCA |
| | CCTCCGACCTCCGCCTGCTCTGGGGATGCTCCCAGCCCTGCTGCGGCAGAACGCGACATGCTAACCGGAATCCCTAGG |
| | CCGCCTGTCTCCTACCCATACTTAGAGGCCCCGCTCAGACGGTCCTTAAAACGTCTGAAAGGCCGTTCCTGCCAGAGT |
| | CCCTGCTACCTGTTACCTCCACCCCTATTTAGTCCTAGTGGACAGCCTCGCTCACCTTCCCTGGGATGACACTTCTGGC |
| | GGCTGAGATGAGCGAGCCTCTCTGGGCTCTGCCGCCGGGTGTGGGCTGACCTGCCTACAGCTGGGGCCTGATAAGGC |
| | AGCAGCAAAAGGGTGGAGGGGAGGCAGTGTTGAAGCTGGGGCAAGTAATTTTCCCCAATTTACAGGGAAAAACCGA |
| | AATTCAGAAAAGTTTAATGTCACCCAGGGGCTGGAGCCCAGACCTCTGGCAGCTCTCACTTTCACAATGCCCTTGGGC |
| | TGACTAGGCTGCAGAGGGGTTTCACCCCAACCCCAGGGCACCTCAAGTGTCCCCACCAAACCTTCCTAACACCTGTCC |
| | ACTAAGCTGTACTAGGCCCTTGCAACTGACCTATGGGACCTGAGGCCTGGCCCCTCATGGCTCCTGTCACCAGGTCTC |
| | AGGTCAGGGTCCAGCAGGCCCTGAGCTGACGTGTGGAGCCAGAGCCACCCAATCCCGTAGGGACAGGTTTCACAACT |
| | TCCCGGATGGGGCTGTGGTGGGTCACAGTGCAGCCTCCAGCCAGAAGGATGGGGTGGCTCCCACTCCTGCTGCTTCTG |
| | ACTCAATGCTTAGGGGTCCCTGGGCAGCGCTCGCCATTGAATGACTTCCAAGTGCTCCGGGGCACAGAGCTACAGCA |
| | CCTGCTACATGCGGTGGTGCCCGGGCCTTGGCAGGAGGATGTGGCAGATGCTGAAGAGTGTGCTGGTCGCTGTGGGC |
| | CCTTAATGGACTGCCGGGCCTTCCACTACAACGTGAGCAGCCATGGTTGCCAACTGCTGCCATGGACTCAACACTCGC |
| | CCCACACGAGGCTGCGGCGTTCTGGGCGCTGTGACCTCTTCCAGAAGAAAGACTACGTACGGACCTGCATCATGAAC |
| | AATGGGGTTGGGTACCGGGGCACCATGGCCACGACCGTGGGTGGCCTGCCCTGCCAGGCTTGGAGCCACAAGTTCCC |
| | AAATGATCACAAGTACACGCCCACTCTCCGGAATGGCCTGGAAGAGAACTTCTGCCGTAACCCTGATGGCGACCCCG |
| | GAGGTCCTTGGTGCTACACAACAGACCCTGCTGTGCGCTTCCAGAGCTGCGGCATCAAATCCTGCCGGGAGGCCGCG |
| | TGTGTCTGGTGCAATGGCGAGGAATACCGCGGCGCGGTAGACCGCACGGAGTCAGGGCGCGAGTGCCAGCGCTGGG |
| | ATCTTCAGCACCCGCACCAGCACCCCTTCGAGCCGGGCAAGTTCCTCGACCAAGGTCTGGACGACAACTATTGCCGG |
| | AATCCTGACGGCTCCGAGCGGCCATGGTGCTACACTACGGATCCGCAGATCGAGCGAGAGTTCTGTGACCTCCCCCG |
| | CTGCGGGTCCGAGGCACAGCCCCGCCAAGAGGCCACAACTGTCAGCTGCTTCCGCGGGAAGGGTGAGGGCTACCGG |
| | GGCACAGCCAATACCACCACTGCGGGCGTACCTTGCCAGCGTTGGGACGCGCAAATCCCGCATCAGCACCGATTTAC |
| | GCCAGAAAAATACGCGTGCAAAGACCTTCGGGAGAACTTCTGCCGGAACCCCGACGGCTCAGAGGCGCCCTGGTGCT |
| | TCACACTGCGGCCCGGCATGCGCGCGGCCTTTTGCTACCAGATCCGGCGTTGTACAGACGACGTGCGGCCCCAGGAC |
| | TGCTACCACGGCGCAGGGGAGCAGTACCGCGGCACGGTCAGCAAGACCCGCAAGGGTGTCCAGTGCCAGCGCTGGT |
| | CCGCTGAGACGCCGCACAAGCCGCAGTTCACGTTTACCTCCGAACCGCATGCACAACTGGAGGAGAACTTCTGCCGG |
| | AACCCAGATGGGGATAGCCATGGGCCCTGGTGCTACACGATGGACCCAAGGACCCCATTCGACTACTGTGCCCTGCG |
| | ACGCTGCGCTGATGACCAGCCGCCATCAATCCTGGACCCCCCAGACCAGGTGCAGTTTGAGAAGTGTGGCAAGAGGG |
| | TGGATCGGCTGGATCAGCGGCGTTCCAAGCTGCGCGTGGTTGGGGGCCATCCGGGCAACTCACCCTGGACAGTCAGC |
| | TTGCGGAATCGGCAGGGCCAGCATTTCTGCGGGGGGTCTCTAGTGAAGGAGCAGTGGATACTGACTGCCCGGCAGTG |
| | CTTCTCCTCCTGCCATATGCCTCTCACGGGCTATGAGGTATGGTTGGGCACCCTGTTCCAGAACCCACAGCATGGAGA |
| | GCCAAGCCTACAGCGGGTCCCAGTAGCCAAGATGGTGTGTGGGCCCTCAGGCTCCCAGCTTGTCCTGCTCAAGCTGG |
| | AGAGATCTGTGACCCTGAACCAGCGTGTGGCCCTGATCTGCCTGCCCCCTGAATGGTATGTGGTGCCTCCAGGGACCA |
| | AGTGTGAGATTGCAGGCTGGGGTGAGACCAAAGGTACGGGTAATGACACAGTCCTAAATGTGGCCTTGCTGAATGTC |
| | ATCTCCAACCAGGAGTGTAACATCAAGCACCGAGGACGTGTGCGGGAGAGTGAGATGTGCACTGAGGGACTGTTGGC |
| | CCCTGTGGGGGCCTGTGAGGGTGACTACGGGGGCCCACTTGCCTGCTTTACCCACAACTGCTGGGTCCTGGAAGGAA |
| | TTATAATCCCCAACCGAGTATGCGCAAGGTCCCGCTGGCCAGCTGTCTTCACGCGTGTCTCTGTGTTTGTGGACTGGA |
| | TTCACAAGGTCATGAGACTGGGTTAGGCCCAGCCTTGATGCCATATGCCTTGGGGAGGACAAAACTTCTTGTCAGAC |
| | ATAAAGCCATGTTTCCTCTTTATGCCTGTA |
| 6358 | AAAAGUUUAAUGUCACCCAUU |
| 6359 | AACUUCUUGUCAGACAUAAUU |
| 6360 | UAAUGACACAGUCCUAAAAUU |
| 6361 | GUAAUGACACAGUCCUAAAUU |
| 6362 | CAACCAGGAGUGUAACAUAUU |
| 6363 | CCUGAAUGGUAUGUGGUGAUU |
| 6364 | CACAGUCCUAAAUGUGGCAUU |
| 6365 | CAAGCCGCAGUUCACGUUAUU |
| 6366 | UCUUCACGCGUGUCUCUGAUU |
| 6367 | ACUAUUGCCGGAAUCCUGAUU |
| 6368 | AUUCGACUACUGUGCCCUAUU |
| 6369 | AGUUUGAGAAGUGUGGCAAUU |
| 6370 | AUGACACAGUCCUAAAUGAUU |
| 6371 | ACAAAACUUCUUGUCAGAAUU |
| 6372 | CUUCUUGUCAGACAUAAAUUU |
| 6373 | CUUCUUGUCAGACAUAAAAUU |
| 6374 | CUUCUUGUCAGACAUAAAGUU |
| 6375 | GGUCCUGGAAGGAAUUAUAUU |
| 6376 | GGUCCUGGAAGGAAUUAUUUU |
| 6377 | GACAACUAUUGCCGGAAUAUU |
| 6378 | UGACACAGUCCUAAAUGUAUU |
| 6379 | AGUCCUAAAUGUGGCCUUAUU |
| 6380 | GAGUGUAACAUCAAGCACAUU |
| 6381 | GUGUAACAUCAAGCACCGAUU |
| 6382 | AUUAUAAUCCCCAACCGAAUU |
| 6383 | UAUAAUCCCCAACCGAGUAUU |
| 6384 | ACUUCUUGUCAGACAUAAUUU |
| 6385 | ACUUCUUGUCAGACAUAAAUU |
| 6386 | UCUUGUCAGACAUAAAGCAUU |
| 6387 | UUGUCAGACAUAAAGCCAAUU |
| 6388 | UGGGUGACAUUAAACUUUUUU |
| 6389 | UUAUGUCUGACAAGAAGUUUU |
| 6390 | UUUUAGGACUGUGUCAUUAUU |
| 6391 | UUUAGGACUGUGUCAUUACUU |
| 6392 | UAUGUUACACUCCUGGUUGUU |
| 6393 | UCACCACAUACCAUUCAGGUU |
| 6394 | UGCCACAUUUAGGACUGUGUU |
| 6395 | UAACGUGAACUGCGGCUUGUU |
| 6396 | UCAGAGACACGCGUGAAGAUU |
| 6397 | UCAGGAUUCCGGCAAUAGUUU |
| 6398 | UAGGGCACAGUAGUCGAAUUU |
| 6399 | UUGCCACACUUCUCAAACUUU |
| 6400 | UCAUUUAGGACUGUGUCAUUU |
| 6401 | UUCUGACAAGAAGUUUUGUUU |
| 6402 | AUUUAUGUCUGACAAGAAGUU |
| 6403 | UUUUAUGUCUGACAAGAAGUU |
| 6404 | CUUUAUGUCUGACAAGAAGUU |
| 6405 | UAUAAUUCCUUCCAGGACCUU |
| 6406 | AAUAAUUCCUUCCAGGACCUU |
| 6407 | UAUUCCGGCAAUAGUUGUCUU |
| 6408 | UACAUUUAGGACUGUGUCAUU |
| 6409 | UAAGGCCACAUUUAGGACUUU |
| 6410 | UGUGCUUGAUGUUACACUCUU |
| 6411 | UCGGUGCUUGAUGUUACACUU |
| 6412 | UUCGGUUGGGGAUUAUAAUUU |
| 6413 | UACUCGGUUGGGGAUUAUAUU |
| 6414 | AUUAUGUCUGACAAGAAGUUU |
| 6415 | UUUAUGUCUGACAAGAAGUUU |
| 6416 | UGCUUUAUGUCUGACAAGAUU |
| 6417 | UUGGCUUUAUGUCUGACAAUU |

The application's sequence listing, which the Patent Office published only in electronic form, follows.

SEQUENCE LISTING (6535 sequences)

SEQ ID NO: 1 - RNA, 19 nt, Artificial Sequence
  Description of Artificial Sequence: Synthetic oligonucleotide
cagccuccgcuaggggacc

SEQ ID NO: 2 - RNA, 19 nt, Artificial Sequence
  Description of Artificial Sequence: Synthetic oligonucleotide
agccuccgcuaggggaccc

SEQ ID NO: 3 - RNA, 19 nt, Artificial Sequence
  Description of Artificial Sequence: Synthetic oligonucleotide
gccuccgcuaggggacccc

SEQ ID NO: 4 - RNA, 19 nt, Artificial Sequence
  Description of Artificial Sequence: Synthetic oligonucleotide
ccuccgcuaggggaccccc

SEQ ID NO: 5 - RNA, 19 nt, Artificial Sequence
  Description of Artificial Sequence: Synthetic oligonucleotide
cuccgcuaggggacccccu

SEQ ID NO: 6 - RNA, 19 nt, Artificial Sequence
  Description of Artificial Sequence: Synthetic oligonucleotide
uccgcuaggggacccccuc

SEQ ID NO: 7 - RNA, 19 nt, Artificial Sequence
  Description of Artificial Sequence: Synthetic oligonucleotide
ccgcuaggggacccccucc

SEQ ID NO: 8 - RNA, 19 nt, Artificial Sequence
  Description of Artificial Sequence: Synthetic oligonucleotide
cgcuaggggacccccucca

SEQ ID NO: 9 - RNA, 19 nt, Artificial Sequence
  Description of Artificial Sequence: Synthetic oligonucleotide
gcuaggggacccccuccau

SEQ ID NO: 10 - RNA, 19 nt, Artificial Sequence
  Description of Artificial Sequence: Synthetic oligonucleotide
cuaggggacccccuccaug

SEQ ID NO: 11 - RNA, 19 nt, Artificial Sequence
  Description of Artificial Sequence: Synthetic oligonucleotide
uaggggacccccuccaugg

SEQ ID NO: 12 - RNA, 19 nt, Artificial Sequence
  Description of Artificial Sequence: Synthetic oligonucleotide
aggggacccccuccauggc

SEQ ID NO: 13 - RNA, 19 nt, Artificial Sequence
  Description of Artificial Sequence: Synthetic oligonucleotide
ggggacccccuccauggcu

SEQ ID NO: 14 - RNA, 19 nt, Artificial Sequence
  Description of Artificial Sequence: Synthetic oligonucleotide
gggacccccuccauggcuu

SEQ ID NO: 15 - RNA, 19 nt, Artificial Sequence
  Description of Artificial Sequence: Synthetic oligonucleotide
ggacccccuccauggcuuc

SEQ ID NO: 16 - RNA, 19 nt, Artificial Sequence
  Description of Artificial Sequence: Synthetic oligonucleotide
gacccccuccauggcuucc

SEQ ID NO: 17 - RNA, 19 nt, Artificial Sequence
  Description of Artificial Sequence: Synthetic oligonucleotide
acccccuccauggcuuccc

SEQ ID NO: 18 - RNA, 19 nt, Artificial Sequence
  Description of Artificial Sequence: Synthetic oligonucleotide
cccccuccauggcuuccca

SEQ ID NO: 19 - RNA, 19 nt, Artificial Sequence
  Description of Artificial Sequence: Synthetic oligonucleotide
ccccuccauggcuucccac

SEQ ID NO: 20 - RNA, 19 nt, Artificial Sequence
  Description of Artificial Sequence: Synthetic oligonucleotide
cccuccauggcuucccacc

SEQ ID NO: 21 - RNA, 19 nt, Artificial Sequence
  Description of Artificial Sequence: Synthetic oligonucleotide
ccuccauggcuucccaccg

SEQ ID NO: 22 - RNA, 19 nt, Artificial Sequence
  Description of Artificial Sequence: Synthetic oligonucleotide
cuccauggcuucccaccgg

SEQ ID NO: 23 - RNA, 19 nt, Artificial Sequence
  Description of Artificial Sequence: Synthetic oligonucleotide
uccauggcuucccaccggg

SEQ ID NO: 24 - RNA, 19 nt, Artificial Sequence
  Description of Artificial Sequence: Synthetic oligonucleotide
ccauggcuucccaccgggu

SEQ ID NO: 25 - RNA, 19 nt, Artificial Sequence
  Description of Artificial Sequence: Synthetic oligonucleotide
cauggcuucccaccggguu

SEQ ID NO: 26 - RNA, 19 nt, Artificial Sequence
  Description of Artificial Sequence: Synthetic oligonucleotide
auggcuucccaccggguug

SEQ ID NO: 27 - RNA, 19 nt, Artificial Sequence
  Description of Artificial Sequence: Synthetic oligonucleotide
uggcuucccaccggguugu

SEQ ID NO: 28 - RNA, 19 nt, Artificial Sequence
  Description of Artificial Sequence: Synthetic oligonucleotide
ggcuucccaccggguuguu

SEQ ID NO: 29 - RNA, 19 nt, Artificial Sequence
  Description of Artificial Sequence: Synthetic oligonucleotide
gcuucccaccggguuguuc

SEQ ID NO: 30 - RNA, 19 nt, Artificial Sequence
  Description of Artificial Sequence: Synthetic oligonucleotide
cuucccaccggguuguucc

SEQ ID NO: 31 - RNA, 19 nt, Artificial Sequence
  Description of Artificial Sequence: Synthetic oligonucleotide
uucccaccggguuguucca

SEQ ID NO: 32 - RNA, 19 nt, Artificial Sequence
  Description of Artificial Sequence: Synthetic oligonucleotide
ucccaccggguuguuccag

SEQ ID NO: 33 - RNA, 19 nt, Artificial Sequence
  Description of Artificial Sequence: Synthetic oligonucleotide
cccaccggguuguuccagg

SEQ ID NO: 34 - RNA, 19 nt, Artificial Sequence
  Description of Artificial Sequence: Synthetic oligonucleotide
ccaccggguuguuccaggc

SEQ ID NO: 35 - RNA, 19 nt, Artificial Sequence
  Description of Artificial Sequence: Synthetic oligonucleotide
caccggguuguuccaggcc

SEQ ID NO: 36 - RNA, 19 nt, Artificial Sequence
  Description of Artificial Sequence: Synthetic oligonucleotide
accggguuguuccaggccu

SEQ ID NO: 37 - RNA, 19 nt, Artificial Sequence
  Description of Artificial Sequence: Synthetic oligonucleotide
ccggguuguuccaggccuc

SEQ ID NO: 38 - RNA, 19 nt, Artificial Sequence
  Description of Artificial Sequence: Synthetic oligonucleotide
cggguuguuccaggccuca

SEQ ID NO: 39 - RNA, 19 nt, Artificial Sequence
  Description of Artificial Sequence: Synthetic oligonucleotide
ggguuguuccaggccucag

SEQ ID NO: 40 - RNA, 19 nt, Artificial Sequence
  Description of Artificial Sequence: Synthetic oligonucleotide
gguuguuccaggccucagc

SEQ ID NO: 41 - RNA, 19 nt, Artificial Sequence
  Description of Artificial Sequence: Synthetic oligonucleotide
guuguuccaggccucagcu

SEQ ID NO: 42 - RNA, 19 nt, Artificial Sequence
  Description of Artificial Sequence: Synthetic oligonucleotide
uuguuccaggccucagcuu

SEQ ID NO: 43 - RNA, 19 nt, Artificial Sequence
  Description of Artificial Sequence: Synthetic oligonucleotide
uguuccaggccucagcuuc

SEQ ID NO: 44 - RNA, 19 nt, Artificial Sequence
  Description of Artificial Sequence: Synthetic oligonucleotide
guuccaggccucagcuucg

SEQ ID NO: 45 - RNA, 19 nt, Artificial Sequence
  Description of Artificial Sequence: Synthetic oligonucleotide
uuccaggccucagcuucgc

SEQ ID NO: 46 - RNA, 19 nt, Artificial Sequence
  Description of Artificial Sequence: Synthetic oligonucleotide
uccaggccucagcuucgcc

SEQ ID NO: 47 - RNA, 19 nt, Artificial Sequence
  Description of Artificial Sequence: Synthetic oligonucleotide
ccaggccucagcuucgccg

SEQ ID NO: 48 - RNA, 19 nt, Artificial Sequence
  Description of Artificial Sequence: Synthetic oligonucleotide
caggccucagcuucgccga

SEQ ID NO: 49 - RNA, 19 nt, Artificial Sequence
  Description of Artificial Sequence: Synthetic oligonucleotide
aggccucagcuucgccgaa

SEQ ID NO: 50 - RNA, 19 nt, Artificial Sequence
  Description of Artificial Sequence: Synthetic oligonucleotide
ggccucagcuucgccgaaa

SEQ ID NO: 51 - RNA, 19 nt, Artificial Sequence
  Description of Artificial Sequence: Synthetic oligonucleotide
gccucagcuucgccgaaag

SEQ ID NO: 52 - RNA, 19 nt, Artificial Sequence
  Description of Artificial Sequence: Synthetic oligonucleotide
ccucagcuucgccgaaagg

SEQ ID NO: 53 - RNA, 19 nt, Artificial Sequence
  Description of Artificial Sequence: Synthetic oligonucleotide
cucagcuucgccgaaaggc

SEQ ID NO: 54 - RNA, 19 nt, Artificial Sequence
  Description of Artificial Sequence: Synthetic oligonucleotide
ucagcuucgccgaaaggcc

SEQ ID NO: 55 - RNA, 19 nt, Artificial Sequence
  Description of Artificial Sequence: Synthetic oligonucleotide
cagcuucgccgaaaggccu

SEQ ID NO: 56 - RNA, 19 nt, Artificial Sequence
  Description of Artificial Sequence: Synthetic oligonucleotide
agcuucgccgaaaggccuc

SEQ ID NO: 57 - RNA, 19 nt, Artificial Sequence
  Description of Artificial Sequence: Synthetic oligonucleotide
gcuucgccgaaaggccuca

SEQ ID NO: 58 - RNA, 19 nt, Artificial Sequence
  Description of Artificial Sequence: Synthetic oligonucleotide
cuucgccgaaaggccucac

SEQ ID NO: 59 - RNA, 19 nt, Artificial Sequence
  Description of Artificial Sequence: Synthetic oligonucleotide
uucgccgaaaggccucacc

SEQ ID NO: 60 - RNA, 19 nt, Artificial Sequence
  Description of Artificial Sequence: Synthetic oligonucleotide
ucgccgaaaggccucacca

SEQ ID NO: 61 - RNA, 19 nt, Artificial Sequence
  Description of Artificial Sequence: Synthetic oligonucleotide
cgccgaaaggccucaccac

SEQ ID NO: 62 - RNA, 19 nt, Artificial Sequence
  Description of Artificial Sequence: Synthetic oligonucleotide
gccgaaaggccucaccacc

SEQ ID NO: 63 - RNA, 19 nt, Artificial Sequence
  Description of Artificial Sequence: Synthetic oligonucleotide
ccgaaaggccucaccaccu

SEQ ID NO: 64 - RNA, 19 nt, Artificial Sequence
  Description of Artificial Sequence: Synthetic oligonucleotide
cgaaaggccucaccaccuc

SEQ ID NO: 65 - RNA, 19 nt, Artificial Sequence
  Description of Artificial Sequence: Synthetic oligonucleotide
gaaaggccucaccaccucc

SEQ ID NO: 66 - RNA, 19 nt, Artificial Sequence
  Description of Artificial Sequence: Synthetic oligonucleotide
aaaggccucaccaccuccg

SEQ ID NO: 67 - RNA, 19 nt, Artificial Sequence
  Description of Artificial Sequence: Synthetic oligonucleotide
aaggccucaccaccuccga

SEQ ID NO: 68 - RNA, 19 nt, Artificial Sequence
  Description of Artificial Sequence: Synthetic oligonucleotide
aggccucaccaccuccgac

SEQ ID NO: 69 - RNA, 19 nt, Artificial Sequence
  Description of Artificial Sequence: Synthetic oligonucleotide
ggccucaccaccuccgacc

SEQ ID NO: 70 - RNA, 19 nt, Artificial Sequence
  Description of Artificial Sequence: Synthetic oligonucleotide
gccucaccaccuccgaccu

SEQ ID NO: 71 - RNA, 19 nt, Artificial Sequence
  Description of Artificial Sequence: Synthetic oligonucleotide
ccucaccaccuccgaccuc

SEQ ID NO: 72 - RNA, 19 nt, Artificial Sequence
  Description of Artificial Sequence: Synthetic oligonucleotide
cucaccaccuccgaccucc

SEQ ID NO: 73 - RNA, 19 nt, Artificial Sequence
  Description of Artificial Sequence: Synthetic oligonucleotide
ucaccaccuccgaccuccg

SEQ ID NO: 74 - RNA, 19 nt, Artificial Sequence
  Description of Artificial Sequence: Synthetic oligonucleotide
caccaccuccgaccuccgc

SEQ ID NO: 75 - RNA, 19 nt, Artificial Sequence
  Description of Artificial Sequence: Synthetic oligonucleotide
accaccuccgaccuccgcc

SEQ ID NO: 76 - RNA, 19 nt, Artificial Sequence
  Description of Artificial Sequence: Synthetic oligonucleotide
ccaccuccgaccuccgccu

SEQ ID NO: 77 - RNA, 19 nt, Artificial Sequence
  Description of Artificial Sequence: Synthetic oligonucleotide
caccuccgaccuccgccug

SEQ ID NO: 78 - RNA, 19 nt, Artificial Sequence
  Description of Artificial Sequence: Synthetic oligonucleotide
accuccgaccuccgccugc

SEQ ID NO: 79 - RNA, 19 nt, Artificial Sequence
  Description of Artificial Sequence: Synthetic oligonucleotide
ccuccgaccuccgccugcu

SEQ ID NO: 80 - RNA, 19 nt, Artificial Sequence
  Description of Artificial Sequence: Synthetic oligonucleotide
cuccgaccuccgccugcuc

SEQ ID NO: 81 - RNA, 19 nt, Artificial Sequence
  Description of Artificial Sequence: Synthetic oligonucleotide
uccgaccuccgccugcucu

SEQ ID NO: 82 - RNA, 19 nt, Artificial Sequence
  Description of Artificial Sequence: Synthetic oligonucleotide
ccgaccuccgccugcucug

SEQ ID NO: 83 - RNA, 19 nt, Artificial Sequence
  Description of Artificial Sequence: Synthetic oligonucleotide
cgaccuccgccugcucugg

SEQ ID NO: 84 - RNA, 19 nt, Artificial Sequence
  Description of Artificial Sequence: Synthetic oligonucleotide
gaccuccgccugcucuggg

SEQ ID NO: 85 - RNA, 19 nt, Artificial Sequence
  Description of Artificial Sequence: Synthetic oligonucleotide
accuccgccugcucugggg

SEQ ID NO: 86 - RNA, 19 nt, Artificial Sequence
  Description of Artificial Sequence: Synthetic oligonucleotide
ccuccgccugcucugggga

SEQ ID NO: 87 - RNA, 19 nt, Artificial Sequence
  Description of Artificial Sequence: Synthetic oligonucleotide
cuccgccugcucuggggau

SEQ ID NO: 88 - RNA, 19 nt, Artificial Sequence
  Description of Artificial Sequence: Synthetic oligonucleotide
uccgccugcucuggggaug

SEQ ID NO: 89 - RNA, 19 nt, Artificial Sequence
  Description of Artificial Sequence: Synthetic oligonucleotide
ccgccugcucuggggaugc

SEQ ID NO: 90 - RNA, 19 nt, Artificial Sequence
  Description of Artificial Sequence: Synthetic oligonucleotide
cgccugcucuggggaugcu

SEQ ID NO: 91 - RNA, 19 nt, Artificial Sequence
  Description of Artificial Sequence: Synthetic oligonucleotide
gccugcucuggggaugcuc

SEQ ID NO: 92 - RNA, 19 nt, Artificial Sequence
  Description of Artificial Sequence: Synthetic oligonucleotide
ccugcucuggggaugcucc

SEQ ID NO: 93 - RNA, 19 nt, Artificial Sequence
  Description of Artificial Sequence: Synthetic oligonucleotide
cugcucuggggaugcuccc

SEQ ID NO: 94 - RNA, 19 nt, Artificial Sequence
  Description of Artificial Sequence: Synthetic oligonucleotide
ugcucuggggaugcuccca

SEQ ID NO: 95 - RNA, 19 nt, Artificial Sequence
  Description of Artificial Sequence: Synthetic oligonucleotide
gcucuggggaugcucccag

SEQ ID NO: 96 - RNA, 19 nt, Artificial Sequence
  Description of Artificial Sequence: Synthetic oligonucleotide
cucuggggaugcucccagc

SEQ ID NO: 97 - RNA, 19 nt, Artificial Sequence
  Description of Artificial Sequence: Synthetic oligonucleotide
ucuggggaugcucccagcc

SEQ ID NO: 98 - RNA, 19 nt, Artificial Sequence
  Description of Artificial Sequence: Synthetic oligonucleotide
cuggggaugcucccagccc

SEQ ID NO: 99 - RNA, 19 nt, Artificial Sequence
  Description of Artificial Sequence: Synthetic oligonucleotide
uggggaugcucccagcccu

SEQ ID NO: 100 - RNA, 19 nt, Artificial Sequence
  Description of Artificial Sequence: Synthetic oligonucleotide
ggggaugcucccagcccug

SEQ ID NO: 101 - RNA, 19 nt, Artificial Sequence
  Description of Artificial Sequence: Synthetic oligonucleotide
gggaugcucccagcccugc

SEQ ID NO: 102 - RNA, 19 nt, Artificial Sequence
  Description of Artificial Sequence: Synthetic oligonucleotide
ggaugcucccagcccugcu

SEQ ID NO: 103 - RNA, 19 nt, Artificial Sequence
  Description of Artificial Sequence: Synthetic oligonucleotide
gaugcucccagcccugcug

SEQ ID NO: 104 - RNA, 19 nt, Artificial Sequence
  Description of Artificial Sequence: Synthetic oligonucleotide
augcucccagcccugcugc

SEQ ID NO: 105 - RNA, 19 nt, Artificial Sequence
  Description of Artificial Sequence: Synthetic oligonucleotide
ugcucccagcccugcugcg

SEQ ID NO: 106 - RNA, 19 nt, Artificial Sequence
  Description of Artificial Sequence: Synthetic oligonucleotide
gcucccagcccugcugcgg

SEQ ID NO: 107 - RNA, 19 nt, Artificial Sequence
  Description of Artificial Sequence: Synthetic oligonucleotide
cucccagcccugcugcggc

SEQ ID NO: 108 - RNA, 19 nt, Artificial Sequence
  Description of Artificial Sequence: Synthetic oligonucleotide
ucccagcccugcugcggca

SEQ ID NO: 109 - RNA, 19 nt, Artificial Sequence
  Description of Artificial Sequence: Synthetic oligonucleotide
cccagcccugcugcggcag

SEQ ID NO: 110 - RNA, 19 nt, Artificial Sequence
  Description of Artificial Sequence: Synthetic oligonucleotide
ccagcccugcugcggcaga

SEQ ID NO: 111 - RNA, 19 nt, Artificial Sequence
  Description of Artificial Sequence: Synthetic oligonucleotide
cagcccugcugcggcagaa

SEQ ID NO: 112 - RNA, 19 nt, Artificial Sequence
  Description of Artificial Sequence: Synthetic oligonucleotide
agcccugcugcggcagaac

SEQ ID NO: 113 - RNA, 19 nt, Artificial Sequence
  Description of Artificial Sequence: Synthetic oligonucleotide
gcccugcugcggcagaacg

SEQ ID NO: 114 - RNA, 19 nt, Artificial Sequence
  Description of Artificial Sequence: Synthetic oligonucleotide
cccugcugcggcagaacgc

SEQ ID NO: 115 - RNA, 19 nt, Artificial Sequence
  Description of Artificial Sequence: Synthetic oligonucleotide
ccugcugcggcagaacgcg

SEQ ID NO: 116 - RNA, 19 nt, Artificial Sequence
  Description of Artificial Sequence: Synthetic oligonucleotide
cugcugcggcagaacgcga

SEQ ID NO: 117 - RNA, 19 nt, Artificial Sequence
  Description of Artificial Sequence: Synthetic oligonucleotide
ugcugcggcagaacgcgac

SEQ ID NO: 118 - RNA, 19 nt, Artificial Sequence
  Description of Artificial Sequence: Synthetic oligonucleotide
gcugcggcagaacgcgaca

SEQ ID NO: 119 - RNA, 19 nt, Artificial Sequence
  Description of Artificial Sequence: Synthetic oligonucleotide
cugcggcagaacgcgacau

SEQ ID NO: 120 - RNA, 19 nt, Artificial Sequence
  Description of Artificial Sequence: Synthetic oligonucleotide
ugcggcagaacgcgacaug

SEQ ID NO: 121 - RNA, 19 nt, Artificial Sequence
  Description of Artificial Sequence: Synthetic oligonucleotide
gcggcagaacgcgacaugc

SEQ ID NO: 122 - RNA, 19 nt, Artificial Sequence
  Description of Artificial Sequence: Synthetic oligonucleotide
cggcagaacgcgacaugcu

SEQ ID NO: 123 - RNA, 19 nt, Artificial Sequence
  Description of Artificial Sequence: Synthetic oligonucleotide
ggcagaacgcgacaugcua

SEQ ID NO: 124 - RNA, 19 nt, Artificial Sequence
  Description of Artificial Sequence: Synthetic oligonucleotide
gcagaacgcgacaugcuaa

SEQ ID NO: 125 - RNA, 19 nt, Artificial Sequence
  Description of Artificial Sequence: Synthetic oligonucleotide
cagaacgcgacaugcuaac

SEQ ID NO: 126 - RNA, 19 nt, Artificial Sequence
  Description of Artificial Sequence: Synthetic oligonucleotide
agaacgcgacaugcuaacc

SEQ ID NO: 127 - RNA, 19 nt, Artificial Sequence
  Description of Artificial Sequence: Synthetic oligonucleotide
gaacgcgacaugcuaaccg

SEQ ID NO: 128 - RNA, 19 nt, Artificial Sequence
  Description of Artificial Sequence: Synthetic oligonucleotide
aacgcgacaugcuaaccgg

SEQ ID NO: 129 - RNA, 19 nt, Artificial Sequence
  Description of Artificial Sequence: Synthetic oligonucleotide
acgcgacaugcuaaccgga

SEQ ID NO: 130 - RNA, 19 nt, Artificial Sequence
  Description of Artificial Sequence: Synthetic oligonucleotide
cgcgacaugcuaaccggaa

SEQ ID NO: 131 - RNA, 19 nt, Artificial Sequence
  Description of Artificial Sequence: Synthetic oligonucleotide
gcgacaugcuaaccggaau

SEQ ID NO: 132 - RNA, 19 nt, Artificial Sequence
  Description of Artificial Sequence: Synthetic oligonucleotide
cgacaugcuaaccggaauc

SEQ ID NO: 133 - RNA, 19 nt, Artificial Sequence
  Description of Artificial Sequence: Synthetic oligonucleotide
gacaugcuaaccggaaucc

SEQ ID NO: 134 - RNA, 19 nt, Artificial Sequence
  Description of Artificial Sequence: Synthetic oligonucleotide
acaugcuaaccggaauccc

SEQ ID NO: 135 - RNA, 19 nt, Artificial Sequence
  Description of Artificial Sequence: Synthetic oligonucleotide
caugcuaaccggaaucccu

SEQ ID NO: 136 - RNA, 19 nt, Artificial Sequence
  Description of Artificial Sequence: Synthetic oligonucleotide
augcuaaccggaaucccua

SEQ ID NO: 137 - RNA, 19 nt, Artificial Sequence
  Description of Artificial Sequence: Synthetic oligonucleotide
ugcuaaccggaaucccuag

SEQ ID NO: 138 - RNA, 19 nt, Artificial Sequence
  Description of Artificial Sequence: Synthetic oligonucleotide
gcuaaccggaaucccuagg

SEQ ID NO: 139 - RNA, 19 nt, Artificial Sequence
  Description of Artificial Sequence: Synthetic oligonucleotide
cuaaccggaaucccuaggc

SEQ ID NO: 140 - RNA, 19 nt, Artificial Sequence
  Description of Artificial Sequence: Synthetic oligonucleotide
uaaccggaaucccuaggcc

SEQ ID NO: 141 - RNA, 19 nt, Artificial Sequence
  Description of Artificial Sequence: Synthetic oligonucleotide
aaccggaaucccuaggccg

SEQ ID NO: 142 - RNA, 19 nt, Artificial Sequence
  Description of Artificial Sequence: Synthetic oligonucleotide
accggaaucccuaggccgc

SEQ ID NO: 143 - RNA, 19 nt, Artificial Sequence
  Description of Artificial Sequence: Synthetic oligonucleotide
ccggaaucccuaggccgcc

SEQ ID NO: 144 - RNA, 19 nt, Artificial Sequence
  Description of Artificial Sequence: Synthetic oligonucleotide
cggaaucccuaggccgccu

SEQ ID NO: 145 - RNA, 19 nt, Artificial Sequence
  Description of Artificial Sequence: Synthetic oligonucleotide
ggaaucccuaggccgccug

SEQ ID NO: 146 - RNA, 19 nt, Artificial Sequence
  Description of Artificial Sequence: Synthetic oligonucleotide
gaaucccuaggccgccugu

SEQ ID NO: 147 - RNA, 19 nt, Artificial Sequence
  Description of Artificial Sequence: Synthetic oligonucleotide
aaucccuaggccgccuguc

SEQ ID NO: 148 - RNA, 19 nt, Artificial Sequence
  Description of Artificial Sequence: Synthetic oligonucleotide
aucccuaggccgccugucu

SEQ ID NO: 149 - RNA, 19 nt, Artificial Sequence
  Description of Artificial Sequence: Synthetic oligonucleotide
ucccuaggccgccugucuc

SEQ ID NO: 150 - RNA, 19 nt, Artificial Sequence
  Description of Artificial Sequence: Synthetic oligonucleotide
cccuaggccgccugucucc

SEQ ID NO: 151 - RNA, 19 nt, Artificial Sequence
  Description of Artificial Sequence: Synthetic oligonucleotide
ccuaggccgccugucuccu

SEQ ID NO: 152 - RNA, 19 nt, Artificial Sequence
  Description of Artificial Sequence: Synthetic oligonucleotide
cuaggccgccugucuccua

SEQ ID NO: 153 - RNA, 19 nt, Artificial Sequence
  Description of Artificial Sequence: Synthetic oligonucleotide
uaggccgccugucuccuac

SEQ ID NO: 154 - RNA, 19 nt, Artificial Sequence
  Description of Artificial Sequence: Synthetic oligonucleotide
aggccgccugucuccuacc

SEQ ID NO: 155 - RNA, 19 nt, Artificial Sequence
  Description of Artificial Sequence: Synthetic oligonucleotide
ggccgccugucuccuaccc

SEQ ID NO: 156 - RNA, 19 nt, Artificial Sequence
  Description of Artificial Sequence: Synthetic oligonucleotide
gccgccugucuccuaccca

SEQ ID NO: 157 - RNA, 19 nt, Artificial Sequence
  Description of Artificial Sequence: Synthetic oligonucleotide
ccgccugucuccuacccau

SEQ ID NO: 158 - RNA, 19 nt, Artificial Sequence
  Description of Artificial Sequence: Synthetic oligonucleotide
cgccugucuccuacccaua

SEQ ID NO: 159 - RNA, 19 nt, Artificial Sequence
  Description of Artificial Sequence: Synthetic oligonucleotide
gccugucuccuacccauac

SEQ ID NO: 160 - RNA, 19 nt, Artificial Sequence
  Description of Artificial Sequence: Synthetic oligonucleotide
ccugucuccuacccauacu

SEQ ID NO: 161 - RNA, 19 nt, Artificial Sequence
  Description of Artificial Sequence: Synthetic oligonucleotide
cugucuccuacccauacuu

SEQ ID NO: 162 - RNA, 19 nt, Artificial Sequence
  Description of Artificial Sequence: Synthetic oligonucleotide
ugucuccuacccauacuua

SEQ ID NO: 163 - RNA, 19 nt, Artificial Sequence
  Description of Artificial Sequence: Synthetic oligonucleotide
gucuccuacccauacuuag

SEQ ID NO: 164 - RNA, 19 nt, Artificial Sequence
  Description of Artificial Sequence: Synthetic oligonucleotide
ucuccuacccauacuuaga

SEQ ID NO: 165 - RNA, 19 nt, Artificial Sequence
  Description of Artificial Sequence: Synthetic oligonucleotide
cuccuacccauacuuagag

SEQ ID NO: 166 - RNA, 19 nt, Artificial Sequence
  Description of Artificial Sequence: Synthetic oligonucleotide
uccuacccauacuuagagg

SEQ ID NO: 167 - RNA, 19 nt, Artificial Sequence
  Description of Artificial Sequence: Synthetic oligonucleotide
ccuacccauacuuagaggc

SEQ ID NO: 168 - RNA, 19 nt, Artificial Sequence
  Description of Artificial Sequence: Synthetic oligonucleotide
cuacccauacuuagaggcc

SEQ ID NO: 169 - RNA, 19 nt, Artificial Sequence
  Description of Artificial Sequence: Synthetic oligonucleotide
uacccauacuuagaggccc

SEQ ID NO: 170 - RNA, 19 nt, Artificial Sequence
  Description of Artificial Sequence: Synthetic oligonucleotide
acccauacuuagaggcccc

SEQ ID NO: 171 - RNA, 19 nt, Artificial Sequence
  Description of Artificial Sequence: Synthetic oligonucleotide
cccauacuuagaggccccg

SEQ ID NO: 172 - RNA, 19 nt, Artificial Sequence
  Description of Artificial Sequence: Synthetic oligonucleotide
ccauacuuagaggccccgc

SEQ ID NO: 173 - RNA, 19 nt, Artificial Sequence
  Description of Artificial Sequence: Synthetic oligonucleotide
cauacuuagaggccccgcu

SEQ ID NO: 174 - RNA, 19 nt, Artificial Sequence
  Description of Artificial Sequence: Synthetic oligonucleotide
auacuuagaggccccgcuc

SEQ ID NO: 175 - RNA, 19 nt, Artificial Sequence
  Description of Artificial Sequence: Synthetic oligonucleotide
uacuuagaggccccgcuca

SEQ ID NO: 176 - RNA, 19 nt, Artificial Sequence
  Description of Artificial Sequence: Synthetic oligonucleotide
acuuagaggccccgcucag

SEQ ID NO: 177 - RNA, 19 nt, Artificial Sequence
  Description of Artificial Sequence: Synthetic oligonucleotide
cuuagaggccccgcucaga

SEQ ID NO: 178 - RNA, 19 nt, Artificial Sequence
  Description of Artificial Sequence: Synthetic oligonucleotide
uuagaggccccgcucagac

SEQ ID NO: 179 - RNA, 19 nt, Artificial Sequence
  Description of Artificial Sequence: Synthetic oligonucleotide
uagaggccccgcucagacg

SEQ ID NO: 180 - RNA, 19 nt, Artificial Sequence
  Description of Artificial Sequence: Synthetic oligonucleotide
agaggccccgcucagacgg

SEQ ID NO: 181 - RNA, 19 nt, Artificial Sequence
  Description of Artificial Sequence: Synthetic oligonucleotide
gaggccccgcucagacggu

SEQ ID NO: 182 - RNA, 19 nt, Artificial Sequence
  Description of Artificial Sequence: Synthetic oligonucleotide
aggccccgcucagacgguc

SEQ ID NO: 183 - RNA, 19 nt, Artificial Sequence
  Description of Artificial Sequence: Synthetic oligonucleotide
ggccccgcucagacggucc

SEQ ID NO: 184 - RNA, 19 nt, Artificial Sequence
  Description of Artificial Sequence: Synthetic oligonucleotide
gccccgcucagacgguccu

SEQ ID NO: 185 - RNA, 19 nt, Artificial Sequence
  Description of Artificial Sequence: Synthetic oligonucleotide
ccccgcucagacgguccuu

SEQ ID NO: 186 - RNA, 19 nt, Artificial Sequence
  Description of Artificial Sequence: Synthetic oligonucleotide
cccgcucagacgguccuua

SEQ ID NO: 187 - RNA, 19 nt, Artificial Sequence
  Description of Artificial Sequence: Synthetic oligonucleotide
ccgcucagacgguccuuaa

SEQ ID NO: 188 - RNA, 19 nt, Artificial Sequence
  Description of Artificial Sequence: Synthetic oligonucleotide
cgcucagacgguccuuaaa

SEQ ID NO: 189 - RNA, 19 nt, Artificial Sequence
  Description of Artificial Sequence: Synthetic oligonucleotide
gcucagacgguccuuaaaa

SEQ ID NO: 190 - RNA, 19 nt, Artificial Sequence
  Description of Artificial Sequence: Synthetic oligonucleotide
cucagacgguccuuaaaac

SEQ ID NO: 191 - RNA, 19 nt, Artificial Sequence
  Description of Artificial Sequence: Synthetic oligonucleotide
ucagacgguccuuaaaacg

SEQ ID NO: 192 - RNA, 19 nt, Artificial Sequence
  Description of Artificial Sequence: Synthetic oligonucleotide
cagacgguccuuaaaacgu

SEQ ID NO: 193 - RNA, 19 nt, Artificial Sequence
  Description of Artificial Sequence: Synthetic oligonucleotide
agacgguccuuaaaacguc

SEQ ID NO: 194 - RNA, 19 nt, Artificial Sequence
  Description of Artificial Sequence: Synthetic oligonucleotide
gacgguccuuaaaacgucu

SEQ ID NO: 195 - RNA, 19 nt, Artificial Sequence
  Description of Artificial Sequence: Synthetic oligonucleotide
acgguccuuaaaacgucug

SEQ ID NO: 196 - RNA, 19 nt, Artificial Sequence
  Description of Artificial Sequence: Synthetic oligonucleotide
cgguccuuaaaacgucuga

SEQ ID NO: 197 - RNA, 19 nt, Artificial Sequence
  Description of Artificial Sequence: Synthetic oligonucleotide
gguccuuaaaacgucugaa

SEQ ID NO: 198 - RNA, 19 nt, Artificial Sequence
  Description of Artificial Sequence: Synthetic oligonucleotide
guccuuaaaacgucugaaa

SEQ ID NO: 199 - RNA, 19 nt, Artificial Sequence
  Description of Artificial Sequence: Synthetic oligonucleotide
uccuuaaaacgucugaaag

SEQ ID NO: 200 - RNA, 19 nt, Artificial Sequence
  Description of Artificial Sequence: Synthetic oligonucleotide
ccuuaaaacgucugaaagg

SEQ ID NO: 201 - RNA, 19 nt, Artificial Sequence
  Description of Artificial Sequence: Synthetic oligonucleotide
cuuaaaacgucugaaaggc

SEQ ID NO: 202 - RNA, 19 nt, Artificial Sequence
  Description of Artificial Sequence: Synthetic oligonucleotide
uuaaaacgucugaaaggcc

SEQ ID NO: 203 - RNA, 19 nt, Artificial Sequence
  Description of Artificial Sequence: Synthetic oligonucleotide
uaaaacgucugaaaggccg

SEQ ID NO: 204 - RNA, 19 nt, Artificial Sequence
  Description of Artificial Sequence: Synthetic oligonucleotide
aaaacgucugaaaggccgu

SEQ ID NO: 205 - RNA, 19 nt, Artificial Sequence
  Description of Artificial Sequence: Synthetic oligonucleotide
aaacgucugaaaggccguu

SEQ ID NO: 206 - RNA, 19 nt, Artificial Sequence
  Description of Artificial Sequence: Synthetic oligonucleotide
aacgucugaaaggccguuc

SEQ ID NO: 207 - RNA, 19 nt, Artificial Sequence
  Description of Artificial Sequence: Synthetic oligonucleotide
acgucugaaaggccguucc

SEQ ID NO: 208 - RNA, 19 nt, Artificial Sequence
  Description of Artificial Sequence: Synthetic oligonucleotide
cgucugaaaggccguuccu

SEQ ID NO: 209 - RNA, 19 nt, Artificial Sequence
  Description of Artificial Sequence: Synthetic oligonucleotide
gucugaaaggccguuccug

SEQ ID NO: 210 - RNA, 19 nt, Artificial Sequence
  Description of Artificial Sequence: Synthetic oligonucleotide
ucugaaaggccguuccugc

SEQ ID NO: 211 - RNA, 19 nt, Artificial Sequence
  Description of Artificial Sequence: Synthetic oligonucleotide
cugaaaggccguuccugcc

SEQ ID NO: 212 - RNA, 19 nt, Artificial Sequence
  Description of Artificial Sequence: Synthetic oligonucleotide
ugaaaggccguuccugcca

SEQ ID NO: 213 - RNA, 19 nt, Artificial Sequence
  Description of Artificial Sequence: Synthetic oligonucleotide
gaaaggccguuccugccag

SEQ ID NO: 214 - RNA, 19 nt, Artificial Sequence
  Description of Artificial Sequence: Synthetic oligonucleotide
aaaggccguuccugccaga

SEQ ID NO: 215 - RNA, 19 nt, Artificial Sequence
  Description of Artificial Sequence: Synthetic oligonucleotide
aaggccguuccugccagag

SEQ ID NO: 216 - RNA, 19 nt, Artificial Sequence
  Description of Artificial Sequence: Synthetic oligonucleotide
aggccguuccugccagagu

SEQ ID NO: 217 - RNA, 19 nt, Artificial Sequence
  Description of Artificial Sequence: Synthetic oligonucleotide
ggccguuccugccagaguc

SEQ ID NO: 218 - RNA, 19 nt, Artificial Sequence
  Description of Artificial Sequence: Synthetic oligonucleotide
gccguuccugccagagucc

SEQ ID NO: 219 - RNA, 19 nt, Artificial Sequence
  Description of Artificial Sequence: Synthetic oligonucleotide
ccguuccugccagaguccc

SEQ ID NO: 220 - RNA, 19 nt, Artificial Sequence
  Description of Artificial Sequence: Synthetic oligonucleotide
cguuccugccagagucccu

SEQ ID NO: 221 - RNA, 19 nt, Artificial Sequence
  Description of Artificial Sequence: Synthetic oligonucleotide
guuccugccagagucccug

SEQ ID NO: 222 - RNA, 19 nt, Artificial Sequence
  Description of Artificial Sequence: Synthetic oligonucleotide
uuccugccagagucccugc

SEQ ID NO: 223 - RNA, 19 nt, Artificial Sequence
  Description of Artificial Sequence: Synthetic oligonucleotide
uccugccagagucccugcu

SEQ ID NO: 224 - RNA, 19 nt, Artificial Sequence
  Description of Artificial Sequence: Synthetic oligonucleotide
ccugccagagucccugcua

SEQ ID NO: 225 - RNA, 19 nt, Artificial Sequence
  Description of Artificial Sequence: Synthetic oligonucleotide
cugccagagucccugcuac

SEQ ID NO: 226 - RNA, 19 nt, Artificial Sequence
  Description of Artificial Sequence: Synthetic oligonucleotide
ugccagagucccugcuacc

SEQ ID NO: 227 - RNA, 19 nt, Artificial Sequence
  Description of Artificial Sequence: Synthetic oligonucleotide
gccagagucccugcuaccu

SEQ ID NO: 228 - RNA, 19 nt, Artificial Sequence
  Description of Artificial Sequence: Synthetic oligonucleotide
ccagagucccugcuaccug

SEQ ID NO: 229 - RNA, 19 nt, Artificial Sequence
  Description of Artificial Sequence: Synthetic oligonucleotide
cagagucccugcuaccugu

SEQ ID NO: 230 - RNA, 19 nt, Artificial Sequence
  Description of Artificial Sequence: Synthetic oligonucleotide
agagucccugcuaccuguu

SEQ ID NO: 231 - RNA, 19 nt, Artificial Sequence
  Description of Artificial Sequence: Synthetic oligonucleotide
gagucccugcuaccuguua

SEQ ID NO: 232 - RNA, 19 nt, Artificial Sequence
  Description of Artificial Sequence: Synthetic oligonucleotide
agucccugcuaccuguuac

SEQ ID NO: 233 - RNA, 19 nt, Artificial Sequence
  Description of Artificial Sequence: Synthetic oligonucleotide
gucccugcuaccuguuacc

SEQ ID NO: 234 - RNA, 19 nt, Artificial Sequence
  Description of Artificial Sequence: Synthetic oligonucleotide
ucccugcuaccuguuaccu

SEQ ID NO: 235 - RNA, 19 nt, Artificial Sequence
  Description of Artificial Sequence: Synthetic oligonucleotide
cccugcuaccuguuaccuc

SEQ ID NO: 236 - RNA, 19 nt, Artificial Sequence
  Description of Artificial Sequence: Synthetic oligonucleotide
ccugcuaccuguuaccucc

SEQ ID NO: 237 - RNA, 19 nt, Artificial Sequence
  Description of Artificial Sequence: Synthetic oligonucleotide
cugcuaccuguuaccucca

SEQ ID NO: 238 - RNA, 19 nt, Artificial Sequence
  Description of Artificial Sequence: Synthetic oligonucleotide
ugcuaccuguuaccuccac

SEQ ID NO: 239 - RNA, 19 nt, Artificial Sequence
  Description of Artificial Sequence: Synthetic oligonucleotide
gcuaccuguuaccuccacc

SEQ ID NO: 240 - RNA, 19 nt, Artificial Sequence
  Description of Artificial Sequence: Synthetic oligonucleotide
cuaccuguuaccuccaccc

SEQ ID NO: 241 - RNA, 19 nt, Artificial Sequence
  Description of Artificial Sequence: Synthetic oligonucleotide
uaccuguuaccuccacccc

SEQ ID NO: 242 - RNA, 19 nt, Artificial Sequence
  Description of Artificial Sequence: Synthetic oligonucleotide
accuguuaccuccaccccu

SEQ ID NO: 243 - RNA, 19 nt, Artificial Sequence
  Description of Artificial Sequence: Synthetic oligonucleotide
ccuguuaccuccaccccua

SEQ ID NO: 244 - RNA, 19 nt, Artificial Sequence
  Description of Artificial Sequence: Synthetic oligonucleotide
cuguuaccuccaccccuau

SEQ ID NO: 245 - RNA, 19 nt, Artificial Sequence
  Description of Artificial Sequence: Synthetic oligonucleotide
uguuaccuccaccccuauu

SEQ ID NO: 246 - RNA, 19 nt, Artificial Sequence
  Description of Artificial Sequence: Synthetic oligonucleotide
guuaccuccaccccuauuu

SEQ ID NO: 247 - RNA, 19 nt, Artificial Sequence
  Description of Artificial Sequence: Synthetic oligonucleotide
uuaccuccaccccuauuua

SEQ ID NO: 248 - RNA, 19 nt, Artificial Sequence
  Description of Artificial Sequence: Synthetic oligonucleotide
uaccuccaccccuauuuag

SEQ ID NO: 249 - RNA, 19 nt, Artificial Sequence
  Description of Artificial Sequence: Synthetic oligonucleotide
accuccaccccuauuuagu

SEQ ID NO: 250 - RNA, 19 nt, Artificial Sequence
  Description of Artificial Sequence: Synthetic oligonucleotide
ccuccaccccuauuuaguc

SEQ ID NO: 251 - RNA, 19 nt, Artificial Sequence
  Description of Artificial Sequence: Synthetic oligonucleotide
cuccaccccuauuuagucc

SEQ ID NO: 252 - RNA, 19 nt, Artificial Sequence
  Description of Artificial Sequence: Synthetic oligonucleotide
uccaccccuauuuaguccu

SEQ ID NO: 253 - RNA, 19 nt, Artificial Sequence
  Description of Artificial Sequence: Synthetic oligonucleotide
ccaccccuauuuaguccua

SEQ ID NO: 254 - RNA, 19 nt, Artificial Sequence
  Description of Artificial Sequence: Synthetic oligonucleotide
caccccuauuuaguccuag

SEQ ID NO: 255 - RNA, 19 nt, Artificial Sequence
  Description of Artificial Sequence: Synthetic oligonucleotide
accccuauuuaguccuagu

SEQ ID NO: 256 - RNA, 19 nt, Artificial Sequence
  Description of Artificial Sequence: Synthetic oligonucleotide
ccccuauuuaguccuagug

SEQ ID NO: 257 - RNA, 19 nt, Artificial Sequence
  Description of Artificial Sequence: Synthetic oligonucleotide
cccuauuuaguccuagugg

SEQ ID NO: 258 - RNA, 19 nt, Artificial Sequence
  Description of Artificial Sequence: Synthetic oligonucleotide
ccuauuuaguccuagugga

SEQ ID NO: 259 - RNA, 19 nt, Artificial Sequence
  Description of Artificial Sequence: Synthetic oligonucleotide
cuauuuaguccuaguggac

SEQ ID NO: 260 - RNA, 19 nt, Artificial Sequence
  Description of Artificial Sequence: Synthetic oligonucleotide
uauuuaguccuaguggaca

SEQ ID NO: 261 - RNA, 19 nt, Artificial Sequence
  Description of Artificial Sequence: Synthetic oligonucleotide
auuuaguccuaguggacag

SEQ ID NO: 262 - RNA, 19 nt, Artificial Sequence
  Description of Artificial Sequence: Synthetic oligonucleotide
uuuaguccuaguggacagc

SEQ ID NO: 263 - RNA, 19 nt, Artificial Sequence
  Description of Artificial Sequence: Synthetic oligonucleotide
uuaguccuaguggacagcc

SEQ ID NO: 264 - RNA, 19 nt, Artificial Sequence
  Description of Artificial Sequence: Synthetic oligonucleotide
uaguccuaguggacagccu

SEQ ID NO: 265 - RNA, 19 nt, Artificial Sequence
  Description of Artificial Sequence: Synthetic oligonucleotide
aguccuaguggacagccuc

SEQ ID NO: 266 - RNA, 19 nt, Artificial Sequence
  Description of Artificial Sequence: Synthetic oligonucleotide
guccuaguggacagccucg

SEQ ID NO: 267 - RNA, 19 nt, Artificial Sequence
  Description of Artificial Sequence: Synthetic oligonucleotide
uccuaguggacagccucgc

SEQ ID NO: 268 - RNA, 19 nt, Artificial Sequence
  Description of Artificial Sequence: Synthetic oligonucleotide
ccuaguggacagccucgcu

SEQ ID NO: 269 - RNA, 19 nt, Artificial Sequence
  Description of Artificial Sequence: Synthetic oligonucleotide
cuaguggacagccucgcuc

SEQ ID NO: 270 - RNA, 19 nt, Artificial Sequence
  Description of Artificial Sequence: Synthetic oligonucleotide
uaguggacagccucgcuca

SEQ ID NO: 271 - RNA, 19 nt, Artificial Sequence
  Description of Artificial Sequence: Synthetic oligonucleotide
aguggacagccucgcucac

SEQ ID NO: 272 - RNA, 19 nt, Artificial Sequence
  Description of Artificial Sequence: Synthetic oligonucleotide
guggacagccucgcucacc

SEQ ID NO: 273 - RNA, 19 nt, Artificial Sequence
  Description of Artificial Sequence: Synthetic oligonucleotide
uggacagccucgcucaccu

SEQ ID NO: 274 - RNA, 19 nt, Artificial Sequence
  Description of Artificial Sequence: Synthetic oligonucleotide
ggacagccucgcucaccuu

SEQ ID NO: 275 - RNA, 19 nt, Artificial Sequence
  Description of Artificial Sequence: Synthetic oligonucleotide
gacagccucgcucaccuuc

SEQ ID NO: 276 - RNA, 19 nt, Artificial Sequence
  Description of Artificial Sequence: Synthetic oligonucleotide
acagccucgcucaccuucc

SEQ ID NO: 277 - RNA, 19 nt, Artificial Sequence
  Description of Artificial Sequence: Synthetic oligonucleotide
cagccucgcucaccuuccc

SEQ ID NO: 278 - RNA, 19 nt, Artificial Sequence
  Description of Artificial Sequence: Synthetic oligonucleotide
agccucgcucaccuucccu

SEQ ID NO: 279 - RNA, 19 nt, Artificial Sequence
  Description of Artificial Sequence: Synthetic oligonucleotide
gccucgcucaccuucccug

SEQ ID NO: 280 - RNA, 19 nt, Artificial Sequence
  Description of Artificial Sequence: Synthetic oligonucleotide
ccucgcucaccuucccugg

SEQ ID NO: 281 - RNA, 19 nt, Artificial Sequence
  Description of Artificial Sequence: Synthetic oligonucleotide
cucgcucaccuucccuggg

SEQ ID NO: 282 - RNA, 19 nt, Artificial Sequence
  Description of Artificial Sequence: Synthetic oligonucleotide
ucgcucaccuucccuggga

SEQ ID NO: 283 - RNA, 19 nt, Artificial Sequence
  Description of Artificial Sequence: Synthetic oligonucleotide
cgcucaccuucccugggau

SEQ ID NO: 284 - RNA, 19 nt, Artificial Sequence
  Description of Artificial Sequence: Synthetic oligonucleotide
gcucaccuucccugggaug

SEQ ID NO: 285 - RNA, 19 nt, Artificial Sequence
  Description of Artificial Sequence: Synthetic oligonucleotide
cucaccuucccugggauga

SEQ ID NO: 286 - RNA, 19 nt, Artificial Sequence
  Description of Artificial Sequence: Synthetic oligonucleotide
ucaccuucccugggaugac

SEQ ID NO: 287 - RNA, 19 nt, Artificial Sequence
  Description of Artificial Sequence: Synthetic oligonucleotide
caccuucccugggaugaca

SEQ ID NO: 288 - RNA, 19 nt, Artificial Sequence
  Description of Artificial Sequence: Synthetic oligonucleotide
accuucccugggaugacac

SEQ ID NO: 289 - RNA, 19 nt, Artificial Sequence
  Description of Artificial Sequence: Synthetic oligonucleotide
ccuucccugggaugacacu

SEQ ID NO: 290 - RNA, 19 nt, Artificial Sequence
  Description of Artificial Sequence: Synthetic oligonucleotide
cuucccugggaugacacuu

SEQ ID NO: 291 - RNA, 19 nt, Artificial Sequence
  Description of Artificial Sequence: Synthetic oligonucleotide
uucccugggaugacacuuc

SEQ ID NO: 292 - RNA, 19 nt, Artificial Sequence
  Description of Artificial Sequence: Synthetic oligonucleotide
ucccugggaugacacuucu

SEQ ID NO: 293 - RNA, 19 nt, Artificial Sequence
  Description of Artificial Sequence: Synthetic oligonucleotide
cccugggaugacacuucug

SEQ ID NO: 294 - RNA, 19 nt, Artificial Sequence
  Description of Artificial Sequence: Synthetic oligonucleotide
ccugggaugacacuucugg

SEQ ID NO: 295 - RNA, 19 nt, Artificial Sequence
  Description of Artificial Sequence: Synthetic oligonucleotide
cugggaugacacuucuggc

SEQ ID NO: 296 - RNA, 19 nt, Artificial Sequence
  Description of Artificial Sequence: Synthetic oligonucleotide
ugggaugacacuucuggcg

SEQ ID NO: 297 - RNA, 19 nt, Artificial Sequence
  Description of Artificial Sequence: Synthetic oligonucleotide
gggaugacacuucuggcgg

SEQ ID NO: 298 - RNA, 19 nt, Artificial Sequence
  Description of Artificial Sequence: Synthetic oligonucleotide
ggaugacacuucuggcggc

SEQ ID NO: 299 - RNA, 19 nt, Artificial Sequence
  Description of Artificial Sequence: Synthetic oligonucleotide
gaugacacuucuggcggcu

SEQ ID NO: 300 - RNA, 19 nt, Artificial Sequence
  Description of Artificial Sequence: Synthetic oligonucleotide
augacacuucuggcggcug

SEQ ID NO: 301 - RNA, 19 nt, Artificial Sequence
  Description of Artificial Sequence: Synthetic oligonucleotide
ugacacuucuggcggcuga

SEQ ID NO: 302 - RNA, 19 nt, Artificial Sequence
  Description of Artificial Sequence: Synthetic oligonucleotide
gacacuucuggcggcugag

SEQ ID NO: 303 - RNA, 19 nt, Artificial Sequence
  Description of Artificial Sequence: Synthetic oligonucleotide
acacuucuggcggcugaga

SEQ ID NO: 304 - RNA, 19 nt, Artificial Sequence
  Description of Artificial Sequence: Synthetic oligonucleotide
cacuucuggcggcugagau

SEQ ID NO: 305 - RNA, 19 nt, Artificial Sequence
  Description of Artificial Sequence: Synthetic oligonucleotide
acuucuggcggcugagaug

SEQ ID NO: 306 - RNA, 19 nt, Artificial Sequence
  Description of Artificial Sequence: Synthetic oligonucleotide
cuucuggcggcugagauga

SEQ ID NO: 307 - RNA, 19 nt, Artificial Sequence
  Description of Artificial Sequence: Synthetic oligonucleotide
uucuggcggcugagaugag

SEQ ID NO: 308 - RNA, 19 nt, Artificial Sequence
  Description of Artificial Sequence: Synthetic oligonucleotide
ucuggcggcugagaugagc

SEQ ID NO: 309 - RNA, 19 nt, Artificial Sequence
  Description of Artificial Sequence: Synthetic oligonucleotide
cuggcggcugagaugagcg

SEQ ID NO: 310 - RNA, 19 nt, Artificial Sequence
  Description of Artificial Sequence: Synthetic oligonucleotide
uggcggcugagaugagcga

SEQ ID NO: 311 - RNA, 19 nt, Artificial Sequence
  Description of Artificial Sequence: Synthetic oligonucleotide
ggcggcugagaugagcgag

SEQ ID NO: 312 - RNA, 19 nt, Artificial Sequence
  Description of Artificial Sequence: Synthetic oligonucleotide
gcggcugagaugagcgagc

SEQ ID NO: 313 - RNA, 19 nt, Artificial Sequence
  Description of Artificial Sequence: Synthetic oligonucleotide
cggcugagaugagcgagcc

SEQ ID NO: 314 - RNA, 19 nt, Artificial Sequence
  Description of Artificial Sequence: Synthetic oligonucleotide
ggcugagaugagcgagccu

SEQ ID NO: 315 - RNA, 19 nt, Artificial Sequence
  Description of Artificial Sequence: Synthetic oligonucleotide
gcugagaugagcgagccuc

SEQ ID NO: 316 - RNA, 19 nt, Artificial Sequence
  Description of Artificial Sequence: Synthetic oligonucleotide
cugagaugagcgagccucu

SEQ ID NO: 317 - RNA, 19 nt, Artificial Sequence
  Description of Artificial Sequence: Synthetic oligonucleotide
ugagaugagcgagccucuc

SEQ ID NO: 318 - RNA, 19 nt, Artificial Sequence
  Description of Artificial Sequence: Synthetic oligonucleotide
gagaugagcgagccucucu

SEQ ID NO: 319 - RNA, 19 nt, Artificial Sequence
  Description of Artificial Sequence: Synthetic oligonucleotide
agaugagcgagccucucug

SEQ ID NO: 320 - RNA, 19 nt, Artificial Sequence
  Description of Artificial Sequence: Synthetic oligonucleotide
gaugagcgagccucucugg

SEQ ID NO: 321 - RNA, 19 nt, Artificial Sequence
  Description of Artificial Sequence: Synthetic oligonucleotide
augagcgagccucucuggg

SEQ ID NO: 322 - RNA, 19 nt, Artificial Sequence
  Description of Artificial Sequence: Synthetic oligonucleotide
ugagcgagccucucugggc

SEQ ID NO: 323 - RNA, 19 nt, Artificial Sequence
  Description of Artificial Sequence: Synthetic oligonucleotide
gagcgagccucucugggcu

SEQ ID NO: 324 - RNA, 19 nt, Artificial Sequence
  Description of Artificial Sequence: Synthetic oligonucleotide
agcgagccucucugggcuc

SEQ ID NO: 325 - RNA, 19 nt, Artificial Sequence
  Description of Artificial Sequence: Synthetic oligonucleotide
gcgagccucucugggcucu

SEQ ID NO: 326 - RNA, 19 nt, Artificial Sequence
  Description of Artificial Sequence: Synthetic oligonucleotide
cgagccucucugggcucug

SEQ ID NO: 327 - RNA, 19 nt, Artificial Sequence
  Description of Artificial Sequence: Synthetic oligonucleotide
gagccucucugggcucugc

SEQ ID NO: 328 - RNA, 19 nt, Artificial Sequence
  Description of Artificial Sequence: Synthetic oligonucleotide
agccucucugggcucugcc

SEQ ID NO: 329 - RNA, 19 nt, Artificial Sequence
  Description of Artificial Sequence: Synthetic oligonucleotide
gccucucugggcucugccg

SEQ ID NO: 330 - RNA, 19 nt, Artificial Sequence
  Description of Artificial Sequence: Synthetic oligonucleotide
ccucucugggcucugccgc

SEQ ID NO: 331 - RNA, 19 nt, Artificial Sequence
  Description of Artificial Sequence: Synthetic oligonucleotide
cucucugggcucugccgcc

SEQ ID NO: 332 - RNA, 19 nt, Artificial Sequence
  Description of Artificial Sequence: Synthetic oligonucleotide
ucucugggcucugccgccg

SEQ ID NO: 333 - RNA, 19 nt, Artificial Sequence
  Description of Artificial Sequence: Synthetic oligonucleotide
cucugggcucugccgccgg

SEQ ID NO: 334 - RNA, 19 nt, Artificial Sequence
  Description of Artificial Sequence: Synthetic oligonucleotide
ucugggcucugccgccggg

SEQ ID NO: 335 - RNA, 19 nt, Artificial Sequence
  Description of Artificial Sequence: Synthetic oligonucleotide
cugggcucugccgccgggu

SEQ ID NO: 336 - RNA, 19 nt, Artificial Sequence
  Description of Artificial Sequence: Synthetic oligonucleotide
ugggcucugccgccgggug

SEQ ID NO: 337 - RNA, 19 nt, Artificial Sequence
  Description of Artificial Sequence: Synthetic oligonucleotide
gggcucugccgccgggugu

SEQ ID NO: 338 - RNA, 19 nt, Artificial Sequence
  Description of Artificial Sequence: Synthetic oligonucleotide
ggcucugccgccgggugug

SEQ ID NO: 339 - RNA, 19 nt, Artificial Sequence
  Description of Artificial Sequence: Synthetic oligonucleotide
gcucugccgccgggugugg

SEQ ID NO: 340 - RNA, 19 nt, Artificial Sequence
  Description of Artificial Sequence: Synthetic oligonucleotide
cucugccgccggguguggg

SEQ ID NO: 341 - RNA, 19 nt, Artificial Sequence
  Description of Artificial Sequence: Synthetic oligonucleotide
ucugccgccgggugugggc

SEQ ID NO: 342 - RNA, 19 nt, Artificial Sequence
  Description of Artificial Sequence: Synthetic oligonucleotide
cugccgccgggugugggcu

SEQ ID NO: 343 - RNA, 19 nt, Artificial Sequence
  Description of Artificial Sequence: Synthetic oligonucleotide
ugccgccgggugugggcug

SEQ ID NO: 344 - RNA, 19 nt, Artificial Sequence
  Description of Artificial Sequence: Synthetic oligonucleotide
gccgccgggugugggcuga

SEQ ID NO: 345 - RNA, 19 nt, Artificial Sequence
  Description of Artificial Sequence: Synthetic oligonucleotide
ccgccgggugugggcugac

SEQ ID NO: 346 - RNA, 19 nt, Artificial Sequence
  Description of Artificial Sequence: Synthetic oligonucleotide
cgccgggugugggcugacc

SEQ ID NO: 347 - RNA, 19 nt, Artificial Sequence
  Description of Artificial Sequence: Synthetic oligonucleotide
gccgggugugggcugaccu

SEQ ID NO: 348 - RNA, 19 nt, Artificial Sequence
  Description of Artificial Sequence: Synthetic oligonucleotide
ccgggugugggcugaccug

SEQ ID NO: 349 - RNA, 19 nt, Artificial Sequence
  Description of Artificial Sequence: Synthetic oligonucleotide
cgggugugggcugaccugc

SEQ ID NO: 350 - RNA, 19 nt, Artificial Sequence
  Description of Artificial Sequence: Synthetic oligonucleotide
gggugugggcugaccugcc

SEQ ID NO: 351 - RNA, 19 nt, Artificial Sequence
  Description of Artificial Sequence: Synthetic oligonucleotide
ggugugggcugaccugccu

SEQ ID NO: 352 - RNA, 19 nt, Artificial Sequence
  Description of Artificial Sequence: Synthetic oligonucleotide
gugugggcugaccugccua

SEQ ID NO: 353 - RNA, 19 nt, Artificial Sequence
  Description of Artificial Sequence: Synthetic oligonucleotide
ugugggcugaccugccuac

SEQ ID NO: 354 - RNA, 19 nt, Artificial Sequence
  Description of Artificial Sequence: Synthetic oligonucleotide
gugggcugaccugccuaca

SEQ ID NO: 355 - RNA, 19 nt, Artificial Sequence
  Description of Artificial Sequence: Synthetic oligonucleotide
ugggcugaccugccuacag

SEQ ID NO: 356 - RNA, 19 nt, Artificial Sequence
  Description of Artificial Sequence: Synthetic oligonucleotide
gggcugaccugccuacagc

SEQ ID NO: 357 - RNA, 19 nt, Artificial Sequence
  Description of Artificial Sequence: Synthetic oligonucleotide
ggcugaccugccuacagcu

SEQ ID NO: 358 - RNA, 19 nt, Artificial Sequence
  Description of Artificial Sequence: Synthetic oligonucleotide
gcugaccugccuacagcug

SEQ ID NO: 359 - RNA, 19 nt, Artificial Sequence
  Description of Artificial Sequence: Synthetic oligonucleotide
cugaccugccuacagcugg

SEQ ID NO: 360 - RNA, 19 nt, Artificial Sequence
  Description of Artificial Sequence: Synthetic oligonucleotide
ugaccugccuacagcuggg

SEQ ID NO: 361 - RNA, 19 nt, Artificial Sequence
  Description of Artificial Sequence: Synthetic oligonucleotide
gaccugccuacagcugggg

SEQ ID NO: 362 - RNA, 19 nt, Artificial Sequence
  Description of Artificial Sequence: Synthetic oligonucleotide
accugccuacagcuggggc

SEQ ID NO: 363 - RNA, 19 nt, Artificial Sequence
  Description of Artificial Sequence: Synthetic oligonucleotide
ccugccuacagcuggggcc

SEQ ID NO: 364 - RNA, 19 nt, Artificial Sequence
  Description of Artificial Sequence: Synthetic oligonucleotide
cugccuacagcuggggccu

SEQ ID NO: 365 - RNA, 19 nt, Artificial Sequence
  Description of Artificial Sequence: Synthetic oligonucleotide
ugccuacagcuggggccug

SEQ ID NO: 366 - RNA, 19 nt, Artificial Sequence
  Description of Artificial Sequence: Synthetic oligonucleotide
gccuacagcuggggccuga

SEQ ID NO: 367 - RNA, 19 nt, Artificial Sequence
  Description of Artificial Sequence: Synthetic oligonucleotide
ccuacagcuggggccugau

SEQ ID NO: 368 - RNA, 19 nt, Artificial Sequence
  Description of Artificial Sequence: Synthetic oligonucleotide
cuacagcuggggccugaua

SEQ ID NO: 369 - RNA, 19 nt, Artificial Sequence
  Description of Artificial Sequence: Synthetic oligonucleotide
uacagcuggggccugauaa

SEQ ID NO: 370 - RNA, 19 nt, Artificial Sequence
  Description of Artificial Sequence: Synthetic oligonucleotide
acagcuggggccugauaag

SEQ ID NO: 371 - RNA, 19 nt, Artificial Sequence
  Description of Artificial Sequence: Synthetic oligonucleotide
cagcuggggccugauaagg

SEQ ID NO: 372 - RNA, 19 nt, Artificial Sequence
  Description of Artificial Sequence: Synthetic oligonucleotide
agcuggggccugauaaggc

SEQ ID NO: 373 - RNA, 19 nt, Artificial Sequence
  Description of Artificial Sequence: Synthetic oligonucleotide
gcuggggccugauaaggca

SEQ ID NO: 374 - RNA, 19 nt, Artificial Sequence
  Description of Artificial Sequence: Synthetic oligonucleotide
cuggggccugauaaggcag

SEQ ID NO: 375 - RNA, 19 nt, Artificial Sequence
  Description of Artificial Sequence: Synthetic oligonucleotide
uggggccugauaaggcagc

SEQ ID NO: 376 - RNA, 19 nt, Artificial Sequence
  Description of Artificial Sequence: Synthetic oligonucleotide
ggggccugauaaggcagca

SEQ ID NO: 377 - RNA, 19 nt, Artificial Sequence
  Description of Artificial Sequence: Synthetic oligonucleotide
gggccugauaaggcagcag

SEQ ID NO: 378 - RNA, 19 nt, Artificial Sequence
  Description of Artificial Sequence: Synthetic oligonucleotide
ggccugauaaggcagcagc

SEQ ID NO: 379 - RNA, 19 nt, Artificial Sequence
  Description of Artificial Sequence: Synthetic oligonucleotide
gccugauaaggcagcagca

SEQ ID NO: 380 - RNA, 19 nt, Artificial Sequence
  Description of Artificial Sequence: Synthetic oligonucleotide
ccugauaaggcagcagcaa

SEQ ID NO: 381 - RNA, 19 nt, Artificial Sequence
  Description of Artificial Sequence: Synthetic oligonucleotide
cugauaaggcagcagcaaa

SEQ ID NO: 382 - RNA, 19 nt, Artificial Sequence
  Description of Artificial Sequence: Synthetic oligonucleotide
ugauaaggcagcagcaaaa

SEQ ID NO: 383 - RNA, 19 nt, Artificial Sequence
  Description of Artificial Sequence: Synthetic oligonucleotide
gauaaggcagcagcaaaag

SEQ ID NO: 384 - RNA, 19 nt, Artificial Sequence
  Description of Artificial Sequence: Synthetic oligonucleotide
auaaggcagcagcaaaagg

SEQ ID NO: 385 - RNA, 19 nt, Artificial Sequence
  Description of Artificial Sequence: Synthetic oligonucleotide
uaaggcagcagcaaaaggg

SEQ ID NO: 386 - RNA, 19 nt, Artificial Sequence
  Description of Artificial Sequence: Synthetic oligonucleotide
aaggcagcagcaaaagggu

SEQ ID NO: 387 - RNA, 19 nt, Artificial Sequence
  Description of Artificial Sequence: Synthetic oligonucleotide
aggcagcagcaaaagggug

SEQ ID NO: 388 - RNA, 19 nt, Artificial Sequence
  Description of Artificial Sequence: Synthetic oligonucleotide
ggcagcagcaaaagggugg

SEQ ID NO: 389 - RNA, 19 nt, Artificial Sequence
  Description of Artificial Sequence: Synthetic oligonucleotide
gcagcagcaaaagggugga

SEQ ID NO: 390 - RNA, 19 nt, Artificial Sequence
  Description of Artificial Sequence: Synthetic oligonucleotide
cagcagcaaaaggguggag

SEQ ID NO: 391 - RNA, 19 nt, Artificial Sequence
  Description of Artificial Sequence: Synthetic oligonucleotide
agcagcaaaaggguggagg

SEQ ID NO: 392 - RNA, 19 nt, Artificial Sequence
  Description of Artificial Sequence: Synthetic oligonucleotide
gcagcaaaaggguggaggg

SEQ ID NO: 393 - RNA, 19 nt, Artificial Sequence
  Description of Artificial Sequence: Synthetic oligonucleotide
cagcaaaaggguggagggg

SEQ ID NO: 394 - RNA, 19 nt, Artificial Sequence
  Description of Artificial Sequence: Synthetic oligonucleotide
agcaaaaggguggagggga

SEQ ID NO: 395 - RNA, 19 nt, Artificial Sequence
  Description of Artificial Sequence: Synthetic oligonucleotide
gcaaaaggguggaggggag

SEQ ID NO: 396 - RNA, 19 nt, Artificial Sequence
  Description of Artificial Sequence: Synthetic oligonucleotide
caaaaggguggaggggagg

SEQ ID NO: 397 - RNA, 19 nt, Artificial Sequence
  Description of Artificial Sequence: Synthetic oligonucleotide
aaaaggguggaggggaggc

SEQ ID NO: 398 - RNA, 19 nt, Artificial Sequence
  Description of Artificial Sequence: Synthetic oligonucleotide
aaaggguggaggggaggca

SEQ ID NO: 399 - RNA, 19 nt, Artificial Sequence
  Description of Artificial Sequence: Synthetic oligonucleotide
aaggguggaggggaggcag

SEQ ID NO: 400 - RNA, 19 nt, Artificial Sequence
  Description of Artificial Sequence: Synthetic oligonucleotide
aggguggaggggaggcagu

SEQ ID NO: 401 - RNA, 19 nt, Artificial Sequence
  Description of Artificial Sequence: Synthetic oligonucleotide
ggguggaggggaggcagug

SEQ ID NO: 402 - RNA, 19 nt, Artificial Sequence
  Description of Artificial Sequence: Synthetic oligonucleotide
gguggaggggaggcagugu

SEQ ID NO: 403 - RNA, 19 nt, Artificial Sequence
  Description of Artificial Sequence: Synthetic oligonucleotide
guggaggggaggcaguguu

SEQ ID NO: 404 - RNA, 19 nt, Artificial Sequence
  Description of Artificial Sequence: Synthetic oligonucleotide
uggaggggaggcaguguug

SEQ ID NO: 405 - RNA, 19 nt, Artificial Sequence
  Description of Artificial Sequence: Synthetic oligonucleotide
ggaggggaggcaguguuga

SEQ ID NO: 406 - RNA, 19 nt, Artificial Sequence
  Description of Artificial Sequence: Synthetic oligonucleotide
gaggggaggcaguguugaa

SEQ ID NO: 407 - RNA, 19 nt, Artificial Sequence
  Description of Artificial Sequence: Synthetic oligonucleotide
aggggaggcaguguugaag

SEQ ID NO: 408 - RNA, 19 nt, Artificial Sequence
  Description of Artificial Sequence: Synthetic oligonucleotide
ggggaggcaguguugaagc

SEQ ID NO: 409 - RNA, 19 nt, Artificial Sequence
  Description of Artificial Sequence: Synthetic oligonucleotide
gggaggcaguguugaagcu

SEQ ID NO: 410 - RNA, 19 nt, Artificial Sequence
  Description of Artificial Sequence: Synthetic oligonucleotide
ggaggcaguguugaagcug

SEQ ID NO: 411 - RNA, 19 nt, Artificial Sequence
  Description of Artificial Sequence: Synthetic oligonucleotide
gaggcaguguugaagcugg

SEQ ID NO: 412 - RNA, 19 nt, Artificial Sequence
  Description of Artificial Sequence: Synthetic oligonucleotide
aggcaguguugaagcuggg

SEQ ID NO: 413 - RNA, 19 nt, Artificial Sequence
  Description of Artificial Sequence: Synthetic oligonucleotide
ggcaguguugaagcugggg

SEQ ID NO: 414 - RNA, 19 nt, Artificial Sequence
  Description of Artificial Sequence: Synthetic oligonucleotide
gcaguguugaagcuggggc

SEQ ID NO: 415 - RNA, 19 nt, Artificial Sequence
  Description of Artificial Sequence: Synthetic oligonucleotide
caguguugaagcuggggca

SEQ ID NO: 416 - RNA, 19 nt, Artificial Sequence
  Description of Artificial Sequence: Synthetic oligonucleotide
aguguugaagcuggggcaa

SEQ ID NO: 417 - RNA, 19 nt, Artificial Sequence
  Description of Artificial Sequence: Synthetic oligonucleotide
guguugaagcuggggcaag

SEQ ID NO: 418 - RNA, 19 nt, Artificial Sequence
  Description of Artificial Sequence: Synthetic oligonucleotide
uguugaagcuggggcaagu

SEQ ID NO: 419 - RNA, 19 nt, Artificial Sequence
  Description of Artificial Sequence: Synthetic oligonucleotide
guugaagcuggggcaagua

SEQ ID NO: 420 - RNA, 19 nt, Artificial Sequence
  Description of Artificial Sequence: Synthetic oligonucleotide
uugaagcuggggcaaguaa

SEQ ID NO: 421 - RNA, 19 nt, Artificial Sequence
  Description of Artificial Sequence: Synthetic oligonucleotide
ugaagcuggggcaaguaau

SEQ ID NO: 422 - RNA, 19 nt, Artificial Sequence
  Description of Artificial Sequence: Synthetic oligonucleotide
gaagcuggggcaaguaauu

SEQ ID NO: 423 - RNA, 19 nt, Artificial Sequence
  Description of Artificial Sequence: Synthetic oligonucleotide
aagcuggggcaaguaauuu

SEQ ID NO: 424 - RNA, 19 nt, Artificial Sequence
  Description of Artificial Sequence: Synthetic oligonucleotide
agcuggggcaaguaauuuu

SEQ ID NO: 425 - RNA, 19 nt, Artificial Sequence
  Description of Artificial Sequence: Synthetic oligonucleotide
gcuggggcaaguaauuuuc

SEQ ID NO: 426 - RNA, 19 nt, Artificial Sequence
  Description of Artificial Sequence: Synthetic oligonucleotide
cuggggcaaguaauuuucc

SEQ ID NO: 427 - RNA, 19 nt, Artificial Sequence
  Description of Artificial Sequence: Synthetic oligonucleotide
uggggcaaguaauuuuccc

SEQ ID NO: 428 - RNA, 19 nt, Artificial Sequence
  Description of Artificial Sequence: Synthetic oligonucleotide
ggggcaaguaauuuucccc

SEQ ID NO: 429 - RNA, 19 nt, Artificial Sequence
  Description of Artificial Sequence: Synthetic oligonucleotide
gggcaaguaauuuucccca

SEQ ID NO: 430 - RNA, 19 nt, Artificial Sequence
  Description of Artificial Sequence: Synthetic oligonucleotide
ggcaaguaauuuuccccaa

SEQ ID NO: 431 - RNA, 19 nt, Artificial Sequence
  Description of Artificial Sequence: Synthetic oligonucleotide
gcaaguaauuuuccccaau

SEQ ID NO: 432 - RNA, 19 nt, Artificial Sequence
  Description of Artificial Sequence: Synthetic oligonucleotide
caaguaauuuuccccaauu

SEQ ID NO: 433 - RNA, 19 nt, Artificial Sequence
  Description of Artificial Sequence: Synthetic oligonucleotide
aaguaauuuuccccaauuu

SEQ ID NO: 434 - RNA, 19 nt, Artificial Sequence
  Description of Artificial Sequence: Synthetic oligonucleotide
aguaauuuuccccaauuua

SEQ ID NO: 435 - RNA, 19 nt, Artificial Sequence
  Description of Artificial Sequence: Synthetic oligonucleotide
guaauuuuccccaauuuac

SEQ ID NO: 436 - RNA, 19 nt, Artificial Sequence
  Description of Artificial Sequence: Synthetic oligonucleotide
uaauuuuccccaauuuaca

SEQ ID NO: 437 - RNA, 19 nt, Artificial Sequence
  Description of Artificial Sequence: Synthetic oligonucleotide
aauuuuccccaauuuacag

SEQ ID NO: 438 - RNA, 19 nt, Artificial Sequence
  Description of Artificial Sequence: Synthetic oligonucleotide
auuuuccccaauuuacagg

SEQ ID NO: 439 - RNA, 19 nt, Artificial Sequence
  Description of Artificial Sequence: Synthetic oligonucleotide
uuuuccccaauuuacaggg

SEQ ID NO: 440 - RNA, 19 nt, Artificial Sequence
  Description of Artificial Sequence: Synthetic oligonucleotide
uuuccccaauuuacaggga

SEQ ID NO: 441 - RNA, 19 nt, Artificial Sequence
  Description of Artificial Sequence: Synthetic oligonucleotide
uuccccaauuuacagggaa

SEQ ID NO: 442 - RNA, 19 nt, Artificial Sequence
  Description of Artificial Sequence: Synthetic oligonucleotide
uccccaauuuacagggaaa

SEQ ID NO: 443 - RNA, 19 nt, Artificial Sequence
  Description of Artificial Sequence: Synthetic oligonucleotide
ccccaauuuacagggaaaa

SEQ ID NO: 444 - RNA, 19 nt, Artificial Sequence
  Description of Artificial Sequence: Synthetic oligonucleotide
cccaauuuacagggaaaaa

SEQ ID NO: 445 - RNA, 19 nt, Artificial Sequence
  Description of Artificial Sequence: Synthetic oligonucleotide
ccaauuuacagggaaaaac

SEQ ID NO: 446 - RNA, 19 nt, Artificial Sequence
  Description of Artificial Sequence: Synthetic oligonucleotide
caauuuacagggaaaaacc

SEQ ID NO: 447 - RNA, 19 nt, Artificial Sequence
  Description of Artificial Sequence: Synthetic oligonucleotide
aauuuacagggaaaaaccg

SEQ ID NO: 448 - RNA, 19 nt, Artificial Sequence
  Description of Artificial Sequence: Synthetic oligonucleotide
auuuacagggaaaaaccga

SEQ ID NO: 449 - RNA, 19 nt, Artificial Sequence
  Description of Artificial Sequence: Synthetic oligonucleotide
uuuacagggaaaaaccgaa

SEQ ID NO: 450 - RNA, 19 nt, Artificial Sequence
  Description of Artificial Sequence: Synthetic oligonucleotide
uuacagggaaaaaccgaaa

SEQ ID NO: 451 - RNA, 19 nt, Artificial Sequence
  Description of Artificial Sequence: Synthetic oligonucleotide
uacagggaaaaaccgaaau

SEQ ID NO: 452 - RNA, 19 nt, Artificial Sequence
  Description of Artificial Sequence: Synthetic oligonucleotide
acagggaaaaaccgaaauu

SEQ ID NO: 453 - RNA, 19 nt, Artificial Sequence
  Description of Artificial Sequence: Synthetic oligonucleotide
cagggaaaaaccgaaauuc

SEQ ID NO: 454 - RNA, 19 nt, Artificial Sequence
  Description of Artificial Sequence: Synthetic oligonucleotide
agggaaaaaccgaaauuca

SEQ ID NO: 455 - RNA, 19 nt, Artificial Sequence
  Description of Artificial Sequence: Synthetic oligonucleotide
gggaaaaaccgaaauucag

SEQ ID NO: 456 - RNA, 19 nt, Artificial Sequence
  Description of Artificial Sequence: Synthetic oligonucleotide
ggaaaaaccgaaauucaga

SEQ ID NO: 457 - RNA, 19 nt, Artificial Sequence
  Description of Artificial Sequence: Synthetic oligonucleotide
gaaaaaccgaaauucagaa

SEQ ID NO: 458 - RNA, 19 nt, Artificial Sequence
  Description of Artificial Sequence: Synthetic oligonucleotide
aaaaaccgaaauucagaaa

SEQ ID NO: 459 - RNA, 19 nt, Artificial Sequence
  Description of Artificial Sequence: Synthetic oligonucleotide
aaaaccgaaauucagaaaa

SEQ ID NO: 460 - RNA, 19 nt, Artificial Sequence
  Description of Artificial Sequence: Synthetic oligonucleotide
aaaccgaaauucagaaaag

SEQ ID NO: 461 - RNA, 19 nt, Artificial Sequence
  Description of Artificial Sequence: Synthetic oligonucleotide
aaccgaaauucagaaaagu

SEQ ID NO: 462 - RNA, 19 nt, Artificial Sequence
  Description of Artificial Sequence: Synthetic oligonucleotide
accgaaauucagaaaaguu

SEQ ID NO: 463 - RNA, 19 nt, Artificial Sequence
  Description of Artificial Sequence: Synthetic oligonucleotide
ccgaaauucagaaaaguuu

SEQ ID NO: 464 - RNA, 19 nt, Artificial Sequence
  Description of Artificial Sequence: Synthetic oligonucleotide
cgaaauucagaaaaguuua

SEQ ID NO: 465 - RNA, 19 nt, Artificial Sequence
  Description of Artificial Sequence: Synthetic oligonucleotide
gaaauucagaaaaguuuaa

SEQ ID NO: 466 - RNA, 19 nt, Artificial Sequence
  Description of Artificial Sequence: Synthetic oligonucleotide
aaauucagaaaaguuuaau

SEQ ID NO: 467 - RNA, 19 nt, Artificial Sequence
  Description of Artificial Sequence: Synthetic oligonucleotide
aauucagaaaaguuuaaug

SEQ ID NO: 468 - RNA, 19 nt, Artificial Sequence
  Description of Artificial Sequence: Synthetic oligonucleotide
auucagaaaaguuuaaugu

SEQ ID NO: 469 - RNA, 19 nt, Artificial Sequence
  Description of Artificial Sequence: Synthetic oligonucleotide
uucagaaaaguuuaauguc

SEQ ID NO: 470 - RNA, 19 nt, Artificial Sequence
  Description of Artificial Sequence: Synthetic oligonucleotide
ucagaaaaguuuaauguca

SEQ ID NO: 471 - RNA, 19 nt, Artificial Sequence
  Description of Artificial Sequence: Synthetic oligonucleotide
cagaaaaguuuaaugucac

SEQ ID NO: 472 - RNA, 19 nt, Artificial Sequence
  Description of Artificial Sequence: Synthetic oligonucleotide
agaaaaguuuaaugucacc

SEQ ID NO: 473 - RNA, 19 nt, Artificial Sequence
  Description of Artificial Sequence: Synthetic oligonucleotide
gaaaaguuuaaugucaccc

SEQ ID NO: 474 - RNA, 19 nt, Artificial Sequence
  Description of Artificial Sequence: Synthetic oligonucleotide
aaaaguuuaaugucaccca

SEQ ID NO: 475 - RNA, 19 nt, Artificial Sequence
  Description of Artificial Sequence: Synthetic oligonucleotide
aaaguuuaaugucacccag

SEQ ID NO: 476 - RNA, 19 nt, Artificial Sequence
  Description of Artificial Sequence: Synthetic oligonucleotide
aaguuuaaugucacccagg

SEQ ID NO: 477 - RNA, 19 nt, Artificial Sequence
  Description of Artificial Sequence: Synthetic oligonucleotide
aguuuaaugucacccaggg

SEQ ID NO: 478 - RNA, 19 nt, Artificial Sequence
  Description of Artificial Sequence: Synthetic oligonucleotide
guuuaaugucacccagggg

SEQ ID NO: 479 - RNA, 19 nt, Artificial Sequence
  Description of Artificial Sequence: Synthetic oligonucleotide
uuuaaugucacccaggggc

SEQ ID NO: 480 - RNA, 19 nt, Artificial Sequence
  Description of Artificial Sequence: Synthetic oligonucleotide
uuaaugucacccaggggcu

SEQ ID NO: 481 - RNA, 19 nt, Artificial Sequence
  Description of Artificial Sequence: Synthetic oligonucleotide
uaaugucacccaggggcug

SEQ ID NO: 482 - RNA, 19 nt, Artificial Sequence
  Description of Artificial Sequence: Synthetic oligonucleotide
aaugucacccaggggcugg

SEQ ID NO: 483 - RNA, 19 nt, Artificial Sequence
  Description of Artificial Sequence: Synthetic oligonucleotide
augucacccaggggcugga

SEQ ID NO: 484 - RNA, 19 nt, Artificial Sequence
  Description of Artificial Sequence: Synthetic oligonucleotide
ugucacccaggggcuggag

SEQ ID NO: 485 - RNA, 19 nt, Artificial Sequence
  Description of Artificial Sequence: Synthetic oligonucleotide
gucacccaggggcuggagc

SEQ ID NO: 486 - RNA, 19 nt, Artificial Sequence
  Description of Artificial Sequence: Synthetic oligonucleotide
ucacccaggggcuggagcc

SEQ ID NO: 487 - RNA, 19 nt, Artificial Sequence
  Description of Artificial Sequence: Synthetic oligonucleotide
cacccaggggcuggagccc

SEQ ID NO: 488 - RNA, 19 nt, Artificial Sequence
  Description of Artificial Sequence: Synthetic oligonucleotide
acccaggggcuggagccca

SEQ ID NO: 489 - RNA, 19 nt, Artificial Sequence
  Description of Artificial Sequence: Synthetic oligonucleotide
cccaggggcuggagcccag

SEQ ID NO: 490 - RNA, 19 nt, Artificial Sequence
  Description of Artificial Sequence: Synthetic oligonucleotide
ccaggggcuggagcccaga

SEQ ID NO: 491 - RNA, 19 nt, Artificial Sequence
  Description of Artificial Sequence: Synthetic oligonucleotide
caggggcuggagcccagac

SEQ ID NO: 492 - RNA, 19 nt, Artificial Sequence
  Description of Artificial Sequence: Synthetic oligonucleotide
aggggcuggagcccagacc

SEQ ID NO: 493 - RNA, 19 nt, Artificial Sequence
  Description of Artificial Sequence: Synthetic oligonucleotide
ggggcuggagcccagaccu

SEQ ID NO: 494 - RNA, 19 nt, Artificial Sequence
  Description of Artificial Sequence: Synthetic oligonucleotide
gggcuggagcccagaccuc

SEQ ID NO: 495 - RNA, 19 nt, Artificial Sequence
  Description of Artificial Sequence: Synthetic oligonucleotide
ggcuggagcccagaccucu

SEQ ID NO: 496 - RNA, 19 nt, Artificial Sequence
  Description of Artificial Sequence: Synthetic oligonucleotide
gcuggagcccagaccucug

SEQ ID NO: 497 - RNA, 19 nt, Artificial Sequence
  Description of Artificial Sequence: Synthetic oligonucleotide
cuggagcccagaccucugg

SEQ ID NO: 498 - RNA, 19 nt, Artificial Sequence
  Description of Artificial Sequence: Synthetic oligonucleotide
uggagcccagaccucuggc

SEQ ID NO: 499 - RNA, 19 nt, Artificial Sequence
  Description of Artificial Sequence: Synthetic oligonucleotide
ggagcccagaccucuggca

SEQ ID NO: 500 - RNA, 19 nt, Artificial Sequence
  Description of Artificial Sequence: Synthetic oligonucleotide
gagcccagaccucuggcag

SEQ ID NO: 501 - RNA, 19 nt, Artificial Sequence
  Description of Artificial Sequence: Synthetic oligonucleotide
agcccagaccucuggcagc

SEQ ID NO: 502 - RNA, 19 nt, Artificial Sequence
  Description of Artificial Sequence: Synthetic oligonucleotide
gcccagaccucuggcagcu

SEQ ID NO: 503 - RNA, 19 nt, Artificial Sequence
  Description of Artificial Sequence: Synthetic oligonucleotide
cccagaccucuggcagcuc

SEQ ID NO: 504 - RNA, 19 nt, Artificial Sequence
  Description of Artificial Sequence: Synthetic oligonucleotide
ccagaccucuggcagcucu

SEQ ID NO: 505 - RNA, 19 nt, Artificial Sequence
  Description of Artificial Sequence: Synthetic oligonucleotide
cagaccucuggcagcucuc

SEQ ID NO: 506 - RNA, 19 nt, Artificial Sequence
  Description of Artificial Sequence: Synthetic oligonucleotide
agaccucuggcagcucuca

SEQ ID NO: 507 - RNA, 19 nt, Artificial Sequence
  Description of Artificial Sequence: Synthetic oligonucleotide
gaccucuggcagcucucac

SEQ ID NO: 508 - RNA, 19 nt, Artificial Sequence
  Description of Artificial Sequence: Synthetic oligonucleotide
accucuggcagcucucacu

SEQ ID NO: 509 - RNA, 19 nt, Artificial Sequence
  Description of Artificial Sequence: Synthetic oligonucleotide
ccucuggcagcucucacuu

SEQ ID NO: 510 - RNA, 19 nt, Artificial Sequence
  Description of Artificial Sequence: Synthetic oligonucleotide
cucuggcagcucucacuuu

SEQ ID NO: 511 - RNA, 19 nt, Artificial Sequence
  Description of Artificial Sequence: Synthetic oligonucleotide
ucuggcagcucucacuuuc

SEQ ID NO: 512 - RNA, 19 nt, Artificial Sequence
  Description of Artificial Sequence: Synthetic oligonucleotide
cuggcagcucucacuuuca

SEQ ID NO: 513 - RNA, 19 nt, Artificial Sequence
  Description of Artificial Sequence: Synthetic oligonucleotide
uggcagcucucacuuucac

SEQ ID NO: 514 - RNA, 19 nt, Artificial Sequence
  Description of Artificial Sequence: Synthetic oligonucleotide
ggcagcucucacuuucaca

SEQ ID NO: 515 - RNA, 19 nt, Artificial Sequence
  Description of Artificial Sequence: Synthetic oligonucleotide
gcagcucucacuuucacaa

SEQ ID NO: 516 - RNA, 19 nt, Artificial Sequence
  Description of Artificial Sequence: Synthetic oligonucleotide
cagcucucacuuucacaau

SEQ ID NO: 517 - RNA, 19 nt, Artificial Sequence
  Description of Artificial Sequence: Synthetic oligonucleotide
agcucucacuuucacaaug

SEQ ID NO: 518 - RNA, 19 nt, Artificial Sequence
  Description of Artificial Sequence: Synthetic oligonucleotide
gcucucacuuucacaaugc

SEQ ID NO: 519 - RNA, 19 nt, Artificial Sequence
  Description of Artificial Sequence: Synthetic oligonucleotide
cucucacuuucacaaugcc

SEQ ID NO: 520 - RNA, 19 nt, Artificial Sequence
  Description of Artificial Sequence: Synthetic oligonucleotide
ucucacuuucacaaugccc

SEQ ID NO: 521 - RNA, 19 nt, Artificial Sequence
  Description of Artificial Sequence: Synthetic oligonucleotide
cucacuuucacaaugcccu

SEQ ID NO: 522 - RNA, 19 nt, Artificial Sequence
  Description of Artificial Sequence: Synthetic oligonucleotide
ucacuuucacaaugcccuu

SEQ ID NO: 523 - RNA, 19 nt, Artificial Sequence
  Description of Artificial Sequence: Synthetic oligonucleotide
cacuuucacaaugcccuug

SEQ ID NO: 524 - RNA, 19 nt, Artificial Sequence
  Description of Artificial Sequence: Synthetic oligonucleotide
acuuucacaaugcccuugg

SEQ ID NO: 525 - RNA, 19 nt, Artificial Sequence
  Description of Artificial Sequence: Synthetic oligonucleotide
cuuucacaaugcccuuggg

SEQ ID NO: 526 - RNA, 19 nt, Artificial Sequence
  Description of Artificial Sequence: Synthetic oligonucleotide
uuucacaaugcccuugggc

SEQ ID NO: 527 - RNA, 19 nt, Artificial Sequence
  Description of Artificial Sequence: Synthetic oligonucleotide
uucacaaugcccuugggcu

SEQ ID NO: 528 - RNA, 19 nt, Artificial Sequence
  Description of Artificial Sequence: Synthetic oligonucleotide
ucacaaugcccuugggcug

SEQ ID NO: 529 - RNA, 19 nt, Artificial Sequence
  Description of Artificial Sequence: Synthetic oligonucleotide
cacaaugcccuugggcuga

SEQ ID NO: 530 - RNA, 19 nt, Artificial Sequence
  Description of Artificial Sequence: Synthetic oligonucleotide
acaaugcccuugggcugac

SEQ ID NO: 531 - RNA, 19 nt, Artificial Sequence
  Description of Artificial Sequence: Synthetic oligonucleotide
caaugcccuugggcugacu

SEQ ID NO: 532 - RNA, 19 nt, Artificial Sequence
  Description of Artificial Sequence: Synthetic oligonucleotide
aaugcccuugggcugacua

SEQ ID NO: 533 - RNA, 19 nt, Artificial Sequence
  Description of Artificial Sequence: Synthetic oligonucleotide
augcccuugggcugacuag

SEQ ID NO: 534 - RNA, 19 nt, Artificial Sequence
  Description of Artificial Sequence: Synthetic oligonucleotide
ugcccuugggcugacuagg

SEQ ID NO: 535 - RNA, 19 nt, Artificial Sequence
  Description of Artificial Sequence: Synthetic oligonucleotide
gcccuugggcugacuaggc

SEQ ID NO: 536 - RNA, 19 nt, Artificial Sequence
  Description of Artificial Sequence: Synthetic oligonucleotide
cccuugggcugacuaggcu

SEQ ID NO: 537 - RNA, 19 nt, Artificial Sequence
  Description of Artificial Sequence: Synthetic oligonucleotide
ccuugggcugacuaggcug

SEQ ID NO: 538 - RNA, 19 nt, Artificial Sequence
  Description of Artificial Sequence: Synthetic oligonucleotide
cuugggcugacuaggcugc

SEQ ID NO: 539 - RNA, 19 nt, Artificial Sequence
  Description of Artificial Sequence: Synthetic oligonucleotide
uugggcugacuaggcugca

SEQ ID NO: 540 - RNA, 19 nt, Artificial Sequence
  Description of Artificial Sequence: Synthetic oligonucleotide
ugggcugacuaggcugcag

SEQ ID NO: 541 - RNA, 19 nt, Artificial Sequence
  Description of Artificial Sequence: Synthetic oligonucleotide
gggcugacuaggcugcaga

SEQ ID NO: 542 - RNA, 19 nt, Artificial Sequence
  Description of Artificial Sequence: Synthetic oligonucleotide
ggcugacuaggcugcagag

SEQ ID NO: 543 - RNA, 19 nt, Artificial Sequence
  Description of Artificial Sequence: Synthetic oligonucleotide
gcugacuaggcugcagagg

SEQ ID NO: 544 - RNA, 19 nt, Artificial Sequence
  Description of Artificial Sequence: Synthetic oligonucleotide
cugacuaggcugcagaggg

SEQ ID NO: 545 - RNA, 19 nt, Artificial Sequence
  Description of Artificial Sequence: Synthetic oligonucleotide
ugacuaggcugcagagggg

SEQ ID NO: 546 - RNA, 19 nt, Artificial Sequence
  Description of Artificial Sequence: Synthetic oligonucleotide
gacuaggcugcagaggggu

SEQ ID NO: 547 - RNA, 19 nt, Artificial Sequence
  Description of Artificial Sequence: Synthetic oligonucleotide
acuaggcugcagagggguu

SEQ ID NO: 548 - RNA, 19 nt, Artificial Sequence
  Description of Artificial Sequence: Synthetic oligonucleotide
cuaggcugcagagggguuu

SEQ ID NO: 549 - RNA, 19 nt, Artificial Sequence
  Description of Artificial Sequence: Synthetic oligonucleotide
uaggcugcagagggguuuc

SEQ ID NO: 550 - RNA, 19 nt, Artificial Sequence
  Description of Artificial Sequence: Synthetic oligonucleotide
aggcugcagagggguuuca

SEQ ID NO: 551 - RNA, 19 nt, Artificial Sequence
  Description of Artificial Sequence: Synthetic oligonucleotide
ggcugcagagggguuucac

SEQ ID NO: 552 - RNA, 19 nt, Artificial Sequence
  Description of Artificial Sequence: Synthetic oligonucleotide
gcugcagagggguuucacc

SEQ ID NO: 553 - RNA, 19 nt, Artificial Sequence
  Description of Artificial Sequence: Synthetic oligonucleotide
cugcagagggguuucaccc

SEQ ID NO: 554 - RNA, 19 nt, Artificial Sequence
  Description of Artificial Sequence: Synthetic oligonucleotide
ugcagagggguuucacccc

SEQ ID NO: 555 - RNA, 19 nt, Artificial Sequence
  Description of Artificial Sequence: Synthetic oligonucleotide
gcagagggguuucacccca

SEQ ID NO: 556 - RNA, 19 nt, Artificial Sequence
  Description of Artificial Sequence: Synthetic oligonucleotide
cagagggguuucaccccaa

SEQ ID NO: 557 - RNA, 19 nt, Artificial Sequence
  Description of Artificial Sequence: Synthetic oligonucleotide
agagggguuucaccccaac

SEQ ID NO: 558 - RNA, 19 nt, Artificial Sequence
  Description of Artificial Sequence: Synthetic oligonucleotide
gagggguuucaccccaacc

SEQ ID NO: 559 - RNA, 19 nt, Artificial Sequence
  Description of Artificial Sequence: Synthetic oligonucleotide
agggguuucaccccaaccc

SEQ ID NO: 560 - RNA, 19 nt, Artificial Sequence
  Description of Artificial Sequence: Synthetic oligonucleotide
gggguuucaccccaacccc

SEQ ID NO: 561 - RNA, 19 nt, Artificial Sequence
  Description of Artificial Sequence: Synthetic oligonucleotide
ggguuucaccccaacccca

SEQ ID NO: 562 - RNA, 19 nt, Artificial Sequence
  Description of Artificial Sequence: Synthetic oligonucleotide
gguuucaccccaaccccag

SEQ ID NO: 563 - RNA, 19 nt, Artificial Sequence
  Description of Artificial Sequence: Synthetic oligonucleotide
guuucaccccaaccccagg

SEQ ID NO: 564 - RNA, 19 nt, Artificial Sequence
  Description of Artificial Sequence: Synthetic oligonucleotide
uuucaccccaaccccaggg

SEQ ID NO: 565 - RNA, 19 nt, Artificial Sequence
  Description of Artificial Sequence: Synthetic oligonucleotide
uucaccccaaccccagggc

SEQ ID NO: 566 - RNA, 19 nt, Artificial Sequence
  Description of Artificial Sequence: Synthetic oligonucleotide
ucaccccaaccccagggca

SEQ ID NO: 567 - RNA, 19 nt, Artificial Sequence
  Description of Artificial Sequence: Synthetic oligonucleotide
caccccaaccccagggcac

SEQ ID NO: 568 - RNA, 19 nt, Artificial Sequence
  Description of Artificial Sequence: Synthetic oligonucleotide
accccaaccccagggcacc

SEQ ID NO: 569 - RNA, 19 nt, Artificial Sequence
  Description of Artificial Sequence: Synthetic oligonucleotide
ccccaaccccagggcaccu

SEQ ID NO: 570 - RNA, 19 nt, Artificial Sequence
  Description of Artificial Sequence: Synthetic oligonucleotide
cccaaccccagggcaccuc

SEQ ID NO: 571 - RNA, 19 nt, Artificial Sequence
  Description of Artificial Sequence: Synthetic oligonucleotide
ccaaccccagggcaccuca

SEQ ID NO: 572 - RNA, 19 nt, Artificial Sequence
  Description of Artificial Sequence: Synthetic oligonucleotide
caaccccagggcaccucaa

SEQ ID NO: 573 - RNA, 19 nt, Artificial Sequence
  Description of Artificial Sequence: Synthetic oligonucleotide
aaccccagggcaccucaag

SEQ ID NO: 574 - RNA, 19 nt, Artificial Sequence
  Description of Artificial Sequence: Synthetic oligonucleotide
accccagggcaccucaagu

SEQ ID NO: 575 - RNA, 19 nt, Artificial Sequence
  Description of Artificial Sequence: Synthetic oligonucleotide
ccccagggcaccucaagug

SEQ ID NO: 576 - RNA, 19 nt, Artificial Sequence
  Description of Artificial Sequence: Synthetic oligonucleotide
cccagggcaccucaagugu

SEQ ID NO: 577 - RNA, 19 nt, Artificial Sequence
  Description of Artificial Sequence: Synthetic oligonucleotide
ccagggcaccucaaguguc

SEQ ID NO: 578 - RNA, 19 nt, Artificial Sequence
  Description of Artificial Sequence: Synthetic oligonucleotide
cagggcaccucaagugucc

SEQ ID NO: 579 - RNA, 19 nt, Artificial Sequence
  Description of Artificial Sequence: Synthetic oligonucleotide
agggcaccucaaguguccc

SEQ ID NO: 580 - RNA, 19 nt, Artificial Sequence
  Description of Artificial Sequence: Synthetic oligonucleotide
gggcaccucaagugucccc

SEQ ID NO: 581 - RNA, 19 nt, Artificial Sequence
  Description of Artificial Sequence: Synthetic oligonucleotide
ggcaccucaagugucccca

SEQ ID NO: 582 - RNA, 19 nt, Artificial Sequence
  Description of Artificial Sequence: Synthetic oligonucleotide
gcaccucaaguguccccac

SEQ ID NO: 583 - RNA, 19 nt, Artificial Sequence
  Description of Artificial Sequence: Synthetic oligonucleotide
caccucaaguguccccacc

SEQ ID NO: 584 - RNA, 19 nt, Artificial Sequence
  Description of Artificial Sequence: Synthetic oligonucleotide
accucaaguguccccacca

SEQ ID NO: 585 - RNA, 19 nt, Artificial Sequence
  Description of Artificial Sequence: Synthetic oligonucleotide
ccucaaguguccccaccaa

SEQ ID NO: 586 - RNA, 19 nt, Artificial Sequence
  Description of Artificial Sequence: Synthetic oligonucleotide
cucaaguguccccaccaaa

SEQ ID NO: 587 - RNA, 19 nt, Artificial Sequence
  Description of Artificial Sequence: Synthetic oligonucleotide
ucaaguguccccaccaaac

SEQ ID NO: 588 - RNA, 19 nt, Artificial Sequence
  Description of Artificial Sequence: Synthetic oligonucleotide
caaguguccccaccaaacc

SEQ ID NO: 589 - RNA, 19 nt, Artificial Sequence
  Description of Artificial Sequence: Synthetic oligonucleotide
aaguguccccaccaaaccu

SEQ ID NO: 590 - RNA, 19 nt, Artificial Sequence
  Description of Artificial Sequence: Synthetic oligonucleotide
aguguccccaccaaaccuu

SEQ ID NO: 591 - RNA, 19 nt, Artificial Sequence
  Description of Artificial Sequence: Synthetic oligonucleotide
guguccccaccaaaccuuc

SEQ ID NO: 592 - RNA, 19 nt, Artificial Sequence
  Description of Artificial Sequence: Synthetic oligonucleotide
uguccccaccaaaccuucc

SEQ ID NO: 593 - RNA, 19 nt, Artificial Sequence
  Description of Artificial Sequence: Synthetic oligonucleotide
guccccaccaaaccuuccu

SEQ ID NO: 594 - RNA, 19 nt, Artificial Sequence
  Description of Artificial Sequence: Synthetic oligonucleotide
uccccaccaaaccuuccua

SEQ ID NO: 595 - RNA, 19 nt, Artificial Sequence
  Description of Artificial Sequence: Synthetic oligonucleotide
ccccaccaaaccuuccuaa

SEQ ID NO: 596 - RNA, 19 nt, Artificial Sequence
  Description of Artificial Sequence: Synthetic oligonucleotide
cccaccaaaccuuccuaac

SEQ ID NO: 597 - RNA, 19 nt, Artificial Sequence
  Description of Artificial Sequence: Synthetic oligonucleotide
ccaccaaaccuuccuaaca

SEQ ID NO: 598 - RNA, 19 nt, Artificial Sequence
  Description of Artificial Sequence: Synthetic oligonucleotide
caccaaaccuuccuaacac

SEQ ID NO: 599 - RNA, 19 nt, Artificial Sequence
  Description of Artificial Sequence: Synthetic oligonucleotide
accaaaccuuccuaacacc

SEQ ID NO: 600 - RNA, 19 nt, Artificial Sequence
  Description of Artificial Sequence: Synthetic oligonucleotide
ccaaaccuuccuaacaccu

SEQ ID NO: 601 - RNA, 19 nt, Artificial Sequence
  Description of Artificial Sequence: Synthetic oligonucleotide
caaaccuuccuaacaccug

SEQ ID NO: 602 - RNA, 19 nt, Artificial Sequence
  Description of Artificial Sequence: Synthetic oligonucleotide
aaaccuuccuaacaccugu

SEQ ID NO: 603 - RNA, 19 nt, Artificial Sequence
  Description of Artificial Sequence: Synthetic oligonucleotide
aaccuuccuaacaccuguc

SEQ ID NO: 604 - RNA, 19 nt, Artificial Sequence
  Description of Artificial Sequence: Synthetic oligonucleotide
accuuccuaacaccugucc

SEQ ID NO: 605 - RNA, 19 nt, Artificial Sequence
  Description of Artificial Sequence: Synthetic oligonucleotide
ccuuccuaacaccugucca

SEQ ID NO: 606 - RNA, 19 nt, Artificial Sequence
  Description of Artificial Sequence: Synthetic oligonucleotide
cuuccuaacaccuguccac

SEQ ID NO: 607 - RNA, 19 nt, Artificial Sequence
  Description of Artificial Sequence: Synthetic oligonucleotide
uuccuaacaccuguccacu

SEQ ID NO: 608 - RNA, 19 nt, Artificial Sequence
  Description of Artificial Sequence: Synthetic oligonucleotide
uccuaacaccuguccacua

SEQ ID NO: 609 - RNA, 19 nt, Artificial Sequence
  Description of Artificial Sequence: Synthetic oligonucleotide
ccuaacaccuguccacuaa

SEQ ID NO: 610 - RNA, 19 nt, Artificial Sequence
  Description of Artificial Sequence: Synthetic oligonucleotide
cuaacaccuguccacuaag

SEQ ID NO: 611 - RNA, 19 nt, Artificial Sequence
  Description of Artificial Sequence: Synthetic oligonucleotide
uaacaccuguccacuaagc

SEQ ID NO: 612 - RNA, 19 nt, Artificial Sequence
  Description of Artificial Sequence: Synthetic oligonucleotide
aacaccuguccacuaagcu

SEQ ID NO: 613 - RNA, 19 nt, Artificial Sequence
  Description of Artificial Sequence: Synthetic oligonucleotide
acaccuguccacuaagcug

SEQ ID NO: 614 - RNA, 19 nt, Artificial Sequence
  Description of Artificial Sequence: Synthetic oligonucleotide
caccuguccacuaagcugu

SEQ ID NO: 615 - RNA, 19 nt, Artificial Sequence
  Description of Artificial Sequence: Synthetic oligonucleotide
accuguccacuaagcugua

SEQ ID NO: 616 - RNA, 19 nt, Artificial Sequence
  Description of Artificial Sequence: Synthetic oligonucleotide
ccuguccacuaagcuguac

SEQ ID NO: 617 - RNA, 19 nt, Artificial Sequence
  Description of Artificial Sequence: Synthetic oligonucleotide
cuguccacuaagcuguacu

SEQ ID NO: 618 - RNA, 19 nt, Artificial Sequence
  Description of Artificial Sequence: Synthetic oligonucleotide
uguccacuaagcuguacua

SEQ ID NO: 619 - RNA, 19 nt, Artificial Sequence
  Description of Artificial Sequence: Synthetic oligonucleotide
guccacuaagcuguacuag

SEQ ID NO: 620 - RNA, 19 nt, Artificial Sequence
  Description of Artificial Sequence: Synthetic oligonucleotide
uccacuaagcuguacuagg

SEQ ID NO: 621 - RNA, 19 nt, Artificial Sequence
  Description of Artificial Sequence: Synthetic oligonucleotide
ccacuaagcuguacuaggc

SEQ ID NO: 622 - RNA, 19 nt, Artificial Sequence
  Description of Artificial Sequence: Synthetic oligonucleotide
cacuaagcuguacuaggcc

SEQ ID NO: 623 - RNA, 19 nt, Artificial Sequence
  Description of Artificial Sequence: Synthetic oligonucleotide
acuaagcuguacuaggccc

SEQ ID NO: 624 - RNA, 19 nt, Artificial Sequence
  Description of Artificial Sequence: Synthetic oligonucleotide
cuaagcuguacuaggcccu

SEQ ID NO: 625 - RNA, 19 nt, Artificial Sequence
  Description of Artificial Sequence: Synthetic oligonucleotide
uaagcuguacuaggcccuu

SEQ ID NO: 626 - RNA, 19 nt, Artificial Sequence
  Description of Artificial Sequence: Synthetic oligonucleotide
aagcuguacuaggcccuug

SEQ ID NO: 627 - RNA, 19 nt, Artificial Sequence
  Description of Artificial Sequence: Synthetic oligonucleotide
agcuguacuaggcccuugc

SEQ ID NO: 628 - RNA, 19 nt, Artificial Sequence
  Description of Artificial Sequence: Synthetic oligonucleotide
gcuguacuaggcccuugca

SEQ ID NO: 629 - RNA, 19 nt, Artificial Sequence
  Description of Artificial Sequence: Synthetic oligonucleotide
cuguacuaggcccuugcaa

SEQ ID NO: 630 - RNA, 19 nt, Artificial Sequence
  Description of Artificial Sequence: Synthetic oligonucleotide
uguacuaggcccuugcaac

SEQ ID NO: 631 - RNA, 19 nt, Artificial Sequence
  Description of Artificial Sequence: Synthetic oligonucleotide
guacuaggcccuugcaacu

SEQ ID NO: 632 - RNA, 19 nt, Artificial Sequence
  Description of Artificial Sequence: Synthetic oligonucleotide
uacuaggcccuugcaacug

SEQ ID NO: 633 - RNA, 19 nt, Artificial Sequence
  Description of Artificial Sequence: Synthetic oligonucleotide
acuaggcccuugcaacuga

SEQ ID NO: 634 - RNA, 19 nt, Artificial Sequence
  Description of Artificial Sequence: Synthetic oligonucleotide
cuaggcccuugcaacugac

SEQ ID NO: 635 - RNA, 19 nt, Artificial Sequence
  Description of Artificial Sequence: Synthetic oligonucleotide
uaggcccuugcaacugacc

SEQ ID NO: 636 - RNA, 19 nt, Artificial Sequence
  Description of Artificial Sequence: Synthetic oligonucleotide
aggcccuugcaacugaccu

SEQ ID NO: 637 - RNA, 19 nt, Artificial Sequence
  Description of Artificial Sequence: Synthetic oligonucleotide
ggcccuugcaacugaccua

SEQ ID NO: 638 - RNA, 19 nt, Artificial Sequence
  Description of Artificial Sequence: Synthetic oligonucleotide
gcccuugcaacugaccuau

SEQ ID NO: 639 - RNA, 19 nt, Artificial Sequence
  Description of Artificial Sequence: Synthetic oligonucleotide
cccuugcaacugaccuaug

SEQ ID NO: 640 - RNA, 19 nt, Artificial Sequence
  Description of Artificial Sequence: Synthetic oligonucleotide
ccuugcaacugaccuaugg

SEQ ID NO: 641 - RNA, 19 nt, Artificial Sequence
  Description of Artificial Sequence: Synthetic oligonucleotide
cuugcaacugaccuauggg

SEQ ID NO: 642 - RNA, 19 nt, Artificial Sequence
  Description of Artificial Sequence: Synthetic oligonucleotide
uugcaacugaccuauggga

SEQ ID NO: 643 - RNA, 19 nt, Artificial Sequence
  Description of Artificial Sequence: Synthetic oligonucleotide
ugcaacugaccuaugggac

SEQ ID NO: 644 - RNA, 19 nt, Artificial Sequence
  Description of Artificial Sequence: Synthetic oligonucleotide
gcaacugaccuaugggacc

SEQ ID NO: 645 - RNA, 19 nt, Artificial Sequence
  Description of Artificial Sequence: Synthetic oligonucleotide
caacugaccuaugggaccu

SEQ ID NO: 646 - RNA, 19 nt, Artificial Sequence
  Description of Artificial Sequence: Synthetic oligonucleotide
aacugaccuaugggaccug

SEQ ID NO: 647 - RNA, 19 nt, Artificial Sequence
  Description of Artificial Sequence: Synthetic oligonucleotide
acugaccuaugggaccuga

SEQ ID NO: 648 - RNA, 19 nt, Artificial Sequence
  Description of Artificial Sequence: Synthetic oligonucleotide
cugaccuaugggaccugag

SEQ ID NO: 649 - RNA, 19 nt, Artificial Sequence
  Description of Artificial Sequence: Synthetic oligonucleotide
ugaccuaugggaccugagg

SEQ ID NO: 650 - RNA, 19 nt, Artificial Sequence
  Description of Artificial Sequence: Synthetic oligonucleotide
gaccuaugggaccugaggc

SEQ ID NO: 651 - RNA, 19 nt, Artificial Sequence
  Description of Artificial Sequence: Synthetic oligonucleotide
accuaugggaccugaggcc

SEQ ID NO: 652 - RNA, 19 nt, Artificial Sequence
  Description of Artificial Sequence: Synthetic oligonucleotide
ccuaugggaccugaggccu

SEQ ID NO: 653 - RNA, 19 nt, Artificial Sequence
  Description of Artificial Sequence: Synthetic oligonucleotide
cuaugggaccugaggccug

SEQ ID NO: 654 - RNA, 19 nt, Artificial Sequence
  Description of Artificial Sequence: Synthetic oligonucleotide
uaugggaccugaggccugg

SEQ ID NO: 655 - RNA, 19 nt, Artificial Sequence
  Description of Artificial Sequence: Synthetic oligonucleotide
augggaccugaggccuggc

SEQ ID NO: 656 - RNA, 19 nt, Artificial Sequence
  Description of Artificial Sequence: Synthetic oligonucleotide
ugggaccugaggccuggcc

SEQ ID NO: 657 - RNA, 19 nt, Artificial Sequence
  Description of Artificial Sequence: Synthetic oligonucleotide
gggaccugaggccuggccc

SEQ ID NO: 658 - RNA, 19 nt, Artificial Sequence
  Description of Artificial Sequence: Synthetic oligonucleotide
ggaccugaggccuggcccc

SEQ ID NO: 659 - RNA, 19 nt, Artificial Sequence
  Description of Artificial Sequence: Synthetic oligonucleotide
gaccugaggccuggccccu

SEQ ID NO: 660 - RNA, 19 nt, Artificial Sequence
  Description of Artificial Sequence: Synthetic oligonucleotide
accugaggccuggccccuc

SEQ ID NO: 661 - RNA, 19 nt, Artificial Sequence
  Description of Artificial Sequence: Synthetic oligonucleotide
ccugaggccuggccccuca

SEQ ID NO: 662 - RNA, 19 nt, Artificial Sequence
  Description of Artificial Sequence: Synthetic oligonucleotide
cugaggccuggccccucau

SEQ ID NO: 663 - RNA, 19 nt, Artificial Sequence
  Description of Artificial Sequence: Synthetic oligonucleotide
ugaggccuggccccucaug

SEQ ID NO: 664 - RNA, 19 nt, Artificial Sequence
  Description of Artificial Sequence: Synthetic oligonucleotide
gaggccuggccccucaugg

SEQ ID NO: 665 - RNA, 19 nt, Artificial Sequence
  Description of Artificial Sequence: Synthetic oligonucleotide
aggccuggccccucauggc

SEQ ID NO: 666 - RNA, 19 nt, Artificial Sequence
  Description of Artificial Sequence: Synthetic oligonucleotide
ggccuggccccucauggcu

SEQ ID NO: 667 - RNA, 19 nt, Artificial Sequence
  Description of Artificial Sequence: Synthetic oligonucleotide
gccuggccccucauggcuc

SEQ ID NO: 668 - RNA, 19 nt, Artificial Sequence
  Description of Artificial Sequence: Synthetic oligonucleotide
ccuggccccucauggcucc

SEQ ID NO: 669 - RNA, 19 nt, Artificial Sequence
  Description of Artificial Sequence: Synthetic oligonucleotide
cuggccccucauggcuccu

SEQ ID NO: 670 - RNA, 19 nt, Artificial Sequence
  Description of Artificial Sequence: Synthetic oligonucleotide
uggccccucauggcuccug

SEQ ID NO: 671 - RNA, 19 nt, Artificial Sequence
  Description of Artificial Sequence: Synthetic oligonucleotide
ggccccucauggcuccugu

SEQ ID NO: 672 - RNA, 19 nt, Artificial Sequence
  Description of Artificial Sequence: Synthetic oligonucleotide
gccccucauggcuccuguc

SEQ ID NO: 673 - RNA, 19 nt, Artificial Sequence
  Description of Artificial Sequence: Synthetic oligonucleotide
ccccucauggcuccuguca

SEQ ID NO: 674 - RNA, 19 nt, Artificial Sequence
  Description of Artificial Sequence: Synthetic oligonucleotide
cccucauggcuccugucac

SEQ ID NO: 675 - RNA, 19 nt, Artificial Sequence
  Description of Artificial Sequence: Synthetic oligonucleotide
ccucauggcuccugucacc

SEQ ID NO: 676 - RNA, 19 nt, Artificial Sequence
  Description of Artificial Sequence: Synthetic oligonucleotide
cucauggcuccugucacca

SEQ ID NO: 677 - RNA, 19 nt, Artificial Sequence
  Description of Artificial Sequence: Synthetic oligonucleotide
ucauggcuccugucaccag

SEQ ID NO: 678 - RNA, 19 nt, Artificial Sequence
  Description of Artificial Sequence: Synthetic oligonucleotide
cauggcuccugucaccagg

SEQ ID NO: 679 - RNA, 19 nt, Artificial Sequence
  Description of Artificial Sequence: Synthetic oligonucleotide
auggcuccugucaccaggu

SEQ ID NO: 680 - RNA, 19 nt, Artificial Sequence
  Description of Artificial Sequence: Synthetic oligonucleotide
uggcuccugucaccagguc

SEQ ID NO: 681 - RNA, 19 nt, Artificial Sequence
  Description of Artificial Sequence: Synthetic oligonucleotide
ggcuccugucaccaggucu

SEQ ID NO: 682 - RNA, 19 nt, Artificial Sequence
  Description of Artificial Sequence: Synthetic oligonucleotide
gcuccugucaccaggucuc

SEQ ID NO: 683 - RNA, 19 nt, Artificial Sequence
  Description of Artificial Sequence: Synthetic oligonucleotide
cuccugucaccaggucuca

SEQ ID NO: 684 - RNA, 19 nt, Artificial Sequence
  Description of Artificial Sequence: Synthetic oligonucleotide
uccugucaccaggucucag

SEQ ID NO: 685 - RNA, 19 nt, Artificial Sequence
  Description of Artificial Sequence: Synthetic oligonucleotide
ccugucaccaggucucagg

SEQ ID NO: 686 - RNA, 19 nt, Artificial Sequence
  Description of Artificial Sequence: Synthetic oligonucleotide
cugucaccaggucucaggu

SEQ ID NO: 687 - RNA, 19 nt, Artificial Sequence
  Description of Artificial Sequence: Synthetic oligonucleotide
ugucaccaggucucagguc

SEQ ID NO: 688 - RNA, 19 nt, Artificial Sequence
  Description of Artificial Sequence: Synthetic oligonucleotide
gucaccaggucucagguca

SEQ ID NO: 689 - RNA, 19 nt, Artificial Sequence
  Description of Artificial Sequence: Synthetic oligonucleotide
ucaccaggucucaggucag

SEQ ID NO: 690 - RNA, 19 nt, Artificial Sequence
  Description of Artificial Sequence: Synthetic oligonucleotide
caccaggucucaggucagg

SEQ ID NO: 691 - RNA, 19 nt, Artificial Sequence
  Description of Artificial Sequence: Synthetic oligonucleotide
accaggucucaggucaggg

SEQ ID NO: 692 - RNA, 19 nt, Artificial Sequence
  Description of Artificial Sequence: Synthetic oligonucleotide
ccaggucucaggucagggu

SEQ ID NO: 693 - RNA, 19 nt, Artificial Sequence
  Description of Artificial Sequence: Synthetic oligonucleotide
caggucucaggucaggguc

SEQ ID NO: 694 - RNA, 19 nt, Artificial Sequence
  Description of Artificial Sequence: Synthetic oligonucleotide
aggucucaggucagggucc

SEQ ID NO: 695 - RNA, 19 nt, Artificial Sequence
  Description of Artificial Sequence: Synthetic oligonucleotide
ggucucaggucagggucca

SEQ ID NO: 696 - RNA, 19 nt, Artificial Sequence
  Description of Artificial Sequence: Synthetic oligonucleotide
gucucaggucaggguccag

SEQ ID NO: 697 - RNA, 19 nt, Artificial Sequence
  Description of Artificial Sequence: Synthetic oligonucleotide
ucucaggucaggguccagc

SEQ ID NO: 698 - RNA, 19 nt, Artificial Sequence
  Description of Artificial Sequence: Synthetic oligonucleotide
cucaggucaggguccagca

SEQ ID NO: 699 - RNA, 19 nt, Artificial Sequence
  Description of Artificial Sequence: Synthetic oligonucleotide
ucaggucaggguccagcag

SEQ ID NO: 700 - RNA, 19 nt, Artificial Sequence
  Description of Artificial Sequence: Synthetic oligonucleotide
caggucaggguccagcagg

SEQ ID NO: 701 - RNA, 19 nt, Artificial Sequence
  Description of Artificial Sequence: Synthetic oligonucleotide
aggucaggguccagcaggc

SEQ ID NO: 702 - RNA, 19 nt, Artificial Sequence
  Description of Artificial Sequence: Synthetic oligonucleotide
ggucaggguccagcaggcc

SEQ ID NO: 703 - RNA, 19 nt, Artificial Sequence
  Description of Artificial Sequence: Synthetic oligonucleotide
gucaggguccagcaggccc

SEQ ID NO: 704 - RNA, 19 nt, Artificial Sequence
  Description of Artificial Sequence: Synthetic oligonucleotide
ucaggguccagcaggcccu

SEQ ID NO: 705 - RNA, 19 nt, Artificial Sequence
  Description of Artificial Sequence: Synthetic oligonucleotide
caggguccagcaggcccug

SEQ ID NO: 706 - RNA, 19 nt, Artificial Sequence
  Description of Artificial Sequence: Synthetic oligonucleotide
aggguccagcaggcccuga

SEQ ID NO: 707 - RNA, 19 nt, Artificial Sequence
  Description of Artificial Sequence: Synthetic oligonucleotide
ggguccagcaggcccugag

SEQ ID NO: 708 - RNA, 19 nt, Artificial Sequence
  Description of Artificial Sequence: Synthetic oligonucleotide
gguccagcaggcccugagc

SEQ ID NO: 709 - RNA, 19 nt, Artificial Sequence
  Description of Artificial Sequence: Synthetic oligonucleotide
guccagcaggcccugagcu

SEQ ID NO: 710 - RNA, 19 nt, Artificial Sequence
  Description of Artificial Sequence: Synthetic oligonucleotide
uccagcaggcccugagcug

SEQ ID NO: 711 - RNA, 19 nt, Artificial Sequence
  Description of Artificial Sequence: Synthetic oligonucleotide
ccagcaggcccugagcuga

SEQ ID NO: 712 - RNA, 19 nt, Artificial Sequence
  Description of Artificial Sequence: Synthetic oligonucleotide
cagcaggcccugagcugac

SEQ ID NO: 713 - RNA, 19 nt, Artificial Sequence
  Description of Artificial Sequence: Synthetic oligonucleotide
agcaggcccugagcugacg

SEQ ID NO: 714 - RNA, 19 nt, Artificial Sequence
  Description of Artificial Sequence: Synthetic oligonucleotide
gcaggcccugagcugacgu

SEQ ID NO: 715 - RNA, 19 nt, Artificial Sequence
  Description of Artificial Sequence: Synthetic oligonucleotide
caggcccugagcugacgug

SEQ ID NO: 716 - RNA, 19 nt, Artificial Sequence
  Description of Artificial Sequence: Synthetic oligonucleotide
aggcccugagcugacgugu

SEQ ID NO: 717 - RNA, 19 nt, Artificial Sequence
  Description of Artificial Sequence: Synthetic oligonucleotide
ggcccugagcugacgugug

SEQ ID NO: 718 - RNA, 19 nt, Artificial Sequence
  Description of Artificial Sequence: Synthetic oligonucleotide
gcccugagcugacgugugg

SEQ ID NO: 719 - RNA, 19 nt, Artificial Sequence
  Description of Artificial Sequence: Synthetic oligonucleotide
cccugagcugacgugugga

SEQ ID NO: 720 - RNA, 19 nt, Artificial Sequence
  Description of Artificial Sequence: Synthetic oligonucleotide
ccugagcugacguguggag

SEQ ID NO: 721 - RNA, 19 nt, Artificial Sequence
  Description of Artificial Sequence: Synthetic oligonucleotide
cugagcugacguguggagc

SEQ ID NO: 722 - RNA, 19 nt, Artificial Sequence
  Description of Artificial Sequence: Synthetic oligonucleotide
ugagcugacguguggagcc

SEQ ID NO: 723 - RNA, 19 nt, Artificial Sequence
  Description of Artificial Sequence: Synthetic oligonucleotide
gagcugacguguggagcca

SEQ ID NO: 724 - RNA, 19 nt, Artificial Sequence
  Description of Artificial Sequence: Synthetic oligonucleotide
agcugacguguggagccag

SEQ ID NO: 725 - RNA, 19 nt, Artificial Sequence
  Description of Artificial Sequence: Synthetic oligonucleotide
gcugacguguggagccaga

SEQ ID NO: 726 - RNA, 19 nt, Artificial Sequence
  Description of Artificial Sequence: Synthetic oligonucleotide
cugacguguggagccagag

SEQ ID NO: 727 - RNA, 19 nt, Artificial Sequence
  Description of Artificial Sequence: Synthetic oligonucleotide
ugacguguggagccagagc

SEQ ID NO: 728 - RNA, 19 nt, Artificial Sequence
  Description of Artificial Sequence: Synthetic oligonucleotide
gacguguggagccagagcc

SEQ ID NO: 729 - RNA, 19 nt, Artificial Sequence
  Description of Artificial Sequence: Synthetic oligonucleotide
acguguggagccagagcca

SEQ ID NO: 730 - RNA, 19 nt, Artificial Sequence
  Description of Artificial Sequence: Synthetic oligonucleotide
cguguggagccagagccac

SEQ ID NO: 731 - RNA, 19 nt, Artificial Sequence
  Description of Artificial Sequence: Synthetic oligonucleotide
guguggagccagagccacc

SEQ ID NO: 732 - RNA, 19 nt, Artificial Sequence
  Description of Artificial Sequence: Synthetic oligonucleotide
uguggagccagagccaccc

SEQ ID NO: 733 - RNA, 19 nt, Artificial Sequence
  Description of Artificial Sequence: Synthetic oligonucleotide
guggagccagagccaccca

SEQ ID NO: 734 - RNA, 19 nt, Artificial Sequence
  Description of Artificial Sequence: Synthetic oligonucleotide
uggagccagagccacccaa

SEQ ID NO: 735 - RNA, 19 nt, Artificial Sequence
  Description of Artificial Sequence: Synthetic oligonucleotide
ggagccagagccacccaau

SEQ ID NO: 736 - RNA, 19 nt, Artificial Sequence
  Description of Artificial Sequence: Synthetic oligonucleotide
gagccagagccacccaauc

SEQ ID NO: 737 - RNA, 19 nt, Artificial Sequence
  Description of Artificial Sequence: Synthetic oligonucleotide
agccagagccacccaaucc

SEQ ID NO: 738 - RNA, 19 nt, Artificial Sequence
  Description of Artificial Sequence: Synthetic oligonucleotide
gccagagccacccaauccc

SEQ ID NO: 739 - RNA, 19 nt, Artificial Sequence
  Description of Artificial Sequence: Synthetic oligonucleotide
ccagagccacccaaucccg

SEQ ID NO: 740 - RNA, 19 nt, Artificial Sequence
  Description of Artificial Sequence: Synthetic oligonucleotide
cagagccacccaaucccgu

SEQ ID NO: 741 - RNA, 19 nt, Artificial Sequence
  Description of Artificial Sequence: Synthetic oligonucleotide
agagccacccaaucccgua

SEQ ID NO: 742 - RNA, 19 nt, Artificial Sequence
  Description of Artificial Sequence: Synthetic oligonucleotide
gagccacccaaucccguag

SEQ ID NO: 743 - RNA, 19 nt, Artificial Sequence
  Description of Artificial Sequence: Synthetic oligonucleotide
agccacccaaucccguagg

SEQ ID NO: 744 - RNA, 19 nt, Artificial Sequence
  Description of Artificial Sequence: Synthetic oligonucleotide
gccacccaaucccguaggg

SEQ ID NO: 745 - RNA, 19 nt, Artificial Sequence
  Description of Artificial Sequence: Synthetic oligonucleotide
ccacccaaucccguaggga

SEQ ID NO: 746 - RNA, 19 nt, Artificial Sequence
  Description of Artificial Sequence: Synthetic oligonucleotide
cacccaaucccguagggac

SEQ ID NO: 747 - RNA, 19 nt, Artificial Sequence
  Description of Artificial Sequence: Synthetic oligonucleotide
acccaaucccguagggaca

SEQ ID NO: 748 - RNA, 19 nt, Artificial Sequence
  Description of Artificial Sequence: Synthetic oligonucleotide
cccaaucccguagggacag

SEQ ID NO: 749 - RNA, 19 nt, Artificial Sequence
  Description of Artificial Sequence: Synthetic oligonucleotide
ccaaucccguagggacagg

SEQ ID NO: 750 - RNA, 19 nt, Artificial Sequence
  Description of Artificial Sequence: Synthetic oligonucleotide
caaucccguagggacaggu

SEQ ID NO: 751 - RNA, 19 nt, Artificial Sequence
  Description of Artificial Sequence: Synthetic oligonucleotide
aaucccguagggacagguu

SEQ ID NO: 752 - RNA, 19 nt, Artificial Sequence
  Description of Artificial Sequence: Synthetic oligonucleotide
aucccguagggacagguuu

SEQ ID NO: 753 - RNA, 19 nt, Artificial Sequence
  Description of Artificial Sequence: Synthetic oligonucleotide
ucccguagggacagguuuc

SEQ ID NO: 754 - RNA, 19 nt, Artificial Sequence
  Description of Artificial Sequence: Synthetic oligonucleotide
cccguagggacagguuuca

SEQ ID NO: 755 - RNA, 19 nt, Artificial Sequence
  Description of Artificial Sequence: Synthetic oligonucleotide
ccguagggacagguuucac

SEQ ID NO: 756 - RNA, 19 nt, Artificial Sequence
  Description of Artificial Sequence: Synthetic oligonucleotide
cguagggacagguuucaca

SEQ ID NO: 757 - RNA, 19 nt, Artificial Sequence
  Description of Artificial Sequence: Synthetic oligonucleotide
guagggacagguuucacaa

SEQ ID NO: 758 - RNA, 19 nt, Artificial Sequence
  Description of Artificial Sequence: Synthetic oligonucleotide
uagggacagguuucacaac

SEQ ID NO: 759 - RNA, 19 nt, Artificial Sequence
  Description of Artificial Sequence: Synthetic oligonucleotide
agggacagguuucacaacu

SEQ ID NO: 760 - RNA, 19 nt, Artificial Sequence
  Description of Artificial Sequence: Synthetic oligonucleotide
gggacagguuucacaacuu

SEQ ID NO: 761 - RNA, 19 nt, Artificial Sequence
  Description of Artificial Sequence: Synthetic oligonucleotide
ggacagguuucacaacuuc

SEQ ID NO: 762 - RNA, 19 nt, Artificial Sequence
  Description of Artificial Sequence: Synthetic oligonucleotide
gacagguuucacaacuucc

SEQ ID NO: 763 - RNA, 19 nt, Artificial Sequence
  Description of Artificial Sequence: Synthetic oligonucleotide
acagguuucacaacuuccc

SEQ ID NO: 764 - RNA, 19 nt, Artificial Sequence
  Description of Artificial Sequence: Synthetic oligonucleotide
cagguuucacaacuucccg

SEQ ID NO: 765 - RNA, 19 nt, Artificial Sequence
  Description of Artificial Sequence: Synthetic oligonucleotide
agguuucacaacuucccgg

SEQ ID NO: 766 - RNA, 19 nt, Artificial Sequence
  Description of Artificial Sequence: Synthetic oligonucleotide
gguuucacaacuucccgga

SEQ ID NO: 767 - RNA, 19 nt, Artificial Sequence
  Description of Artificial Sequence: Synthetic oligonucleotide
guuucacaacuucccggau

SEQ ID NO: 768 - RNA, 19 nt, Artificial Sequence
  Description of Artificial Sequence: Synthetic oligonucleotide
uuucacaacuucccggaug

SEQ ID NO: 769 - RNA, 19 nt, Artificial Sequence
  Description of Artificial Sequence: Synthetic oligonucleotide
uucacaacuucccggaugg

SEQ ID NO: 770 - RNA, 19 nt, Artificial Sequence
  Description of Artificial Sequence: Synthetic oligonucleotide
ucacaacuucccggauggg

SEQ ID NO: 771 - RNA, 19 nt, Artificial Sequence
  Description of Artificial Sequence: Synthetic oligonucleotide
cacaacuucccggaugggg

SEQ ID NO: 772 - RNA, 19 nt, Artificial Sequence
  Description of Artificial Sequence: Synthetic oligonucleotide
acaacuucccggauggggc

SEQ ID NO: 773 - RNA, 19 nt, Artificial Sequence
  Description of Artificial Sequence: Synthetic oligonucleotide
caacuucccggauggggcu

SEQ ID NO: 774 - RNA, 19 nt, Artificial Sequence
  Description of Artificial Sequence: Synthetic oligonucleotide
aacuucccggauggggcug

SEQ ID NO: 775 - RNA, 19 nt, Artificial Sequence
  Description of Artificial Sequence: Synthetic oligonucleotide
acuucccggauggggcugu

SEQ ID NO: 776 - RNA, 19 nt, Artificial Sequence
  Description of Artificial Sequence: Synthetic oligonucleotide
cuucccggauggggcugug

SEQ ID NO: 777 - RNA, 19 nt, Artificial Sequence
  Description of Artificial Sequence: Synthetic oligonucleotide
uucccggauggggcugugg

SEQ ID NO: 778 - RNA, 19 nt, Artificial Sequence
  Description of Artificial Sequence: Synthetic oligonucleotide
ucccggauggggcuguggu

SEQ ID NO: 779 - RNA, 19 nt, Artificial Sequence
  Description of Artificial Sequence: Synthetic oligonucleotide
cccggauggggcuguggug

SEQ ID NO: 780 - RNA, 19 nt, Artificial Sequence
  Description of Artificial Sequence: Synthetic oligonucleotide
ccggauggggcuguggugg

SEQ ID NO: 781 - RNA, 19 nt, Artificial Sequence
  Description of Artificial Sequence: Synthetic oligonucleotide
cggauggggcugugguggg

SEQ ID NO: 782 - RNA, 19 nt, Artificial Sequence
  Description of Artificial Sequence: Synthetic oligonucleotide
ggauggggcuguggugggu

SEQ ID NO: 783 - RNA, 19 nt, Artificial Sequence
  Description of Artificial Sequence: Synthetic oligonucleotide
gauggggcugugguggguc

SEQ ID NO: 784 - RNA, 19 nt, Artificial Sequence
  Description of Artificial Sequence: Synthetic oligonucleotide
auggggcugugguggguca

SEQ ID NO: 785 - RNA, 19 nt, Artificial Sequence
  Description of Artificial Sequence: Synthetic oligonucleotide
uggggcuguggugggucac

SEQ ID NO: 786 - RNA, 19 nt, Artificial Sequence
  Description of Artificial Sequence: Synthetic oligonucleotide
ggggcuguggugggucaca

SEQ ID NO: 787 - RNA, 19 nt, Artificial Sequence
  Description of Artificial Sequence: Synthetic oligonucleotide
gggcuguggugggucacag

SEQ ID NO: 788 - RNA, 19 nt, Artificial Sequence
  Description of Artificial Sequence: Synthetic oligonucleotide
ggcuguggugggucacagu

SEQ ID NO: 789 - RNA, 19 nt, Artificial Sequence
  Description of Artificial Sequence: Synthetic oligonucleotide
gcuguggugggucacagug

SEQ ID NO: 790 - RNA, 19 nt, Artificial Sequence
  Description of Artificial Sequence: Synthetic oligonucleotide
cuguggugggucacagugc

SEQ ID NO: 791 - RNA, 19 nt, Artificial Sequence
  Description of Artificial Sequence: Synthetic oligonucleotide
uguggugggucacagugca

SEQ ID NO: 792 - RNA, 19 nt, Artificial Sequence
  Description of Artificial Sequence: Synthetic oligonucleotide
guggugggucacagugcag

SEQ ID NO: 793 - RNA, 19 nt, Artificial Sequence
  Description of Artificial Sequence: Synthetic oligonucleotide
uggugggucacagugcagc

SEQ ID NO: 794 - RNA, 19 nt, Artificial Sequence
  Description of Artificial Sequence: Synthetic oligonucleotide
ggugggucacagugcagcc

SEQ ID NO: 795 - RNA, 19 nt, Artificial Sequence
  Description of Artificial Sequence: Synthetic oligonucleotide
gugggucacagugcagccu

SEQ ID NO: 796 - RNA, 19 nt, Artificial Sequence
  Description of Artificial Sequence: Synthetic oligonucleotide
ugggucacagugcagccuc

SEQ ID NO: 797 - RNA, 19 nt, Artificial Sequence
  Description of Artificial Sequence: Synthetic oligonucleotide
gggucacagugcagccucc

SEQ ID NO: 798 - RNA, 19 nt, Artificial Sequence
  Description of Artificial Sequence: Synthetic oligonucleotide
ggucacagugcagccucca

SEQ ID NO: 799 - RNA, 19 nt, Artificial Sequence
  Description of Artificial Sequence: Synthetic oligonucleotide
gucacagugcagccuccag

SEQ ID NO: 800 - RNA, 19 nt, Artificial Sequence
  Description of Artificial Sequence: Synthetic oligonucleotide
ucacagugcagccuccagc

SEQ ID NO: 801 - RNA, 19 nt, Artificial Sequence
  Description of Artificial Sequence: Synthetic oligonucleotide
cacagugcagccuccagcc

SEQ ID NO: 802 - RNA, 19 nt, Artificial Sequence
  Description of Artificial Sequence: Synthetic oligonucleotide
acagugcagccuccagcca

SEQ ID NO: 803 - RNA, 19 nt, Artificial Sequence
  Description of Artificial Sequence: Synthetic oligonucleotide
cagugcagccuccagccag

SEQ ID NO: 804 - RNA, 19 nt, Artificial Sequence
  Description of Artificial Sequence: Synthetic oligonucleotide
agugcagccuccagccaga

SEQ ID NO: 805 - RNA, 19 nt, Artificial Sequence
  Description of Artificial Sequence: Synthetic oligonucleotide
gugcagccuccagccagaa

SEQ ID NO: 806 - RNA, 19 nt, Artificial Sequence
  Description of Artificial Sequence: Synthetic oligonucleotide
ugcagccuccagccagaag

SEQ ID NO: 807 - RNA, 19 nt, Artificial Sequence
  Description of Artificial Sequence: Synthetic oligonucleotide
gcagccuccagccagaagg

SEQ ID NO: 808 - RNA, 19 nt, Artificial Sequence
  Description of Artificial Sequence: Synthetic oligonucleotide
cagccuccagccagaagga

SEQ ID NO: 809 - RNA, 19 nt, Artificial Sequence
  Description of Artificial Sequence: Synthetic oligonucleotide
agccuccagccagaaggau

SEQ ID NO: 810 - RNA, 19 nt, Artificial Sequence
  Description of Artificial Sequence: Synthetic oligonucleotide
gccuccagccagaaggaug

SEQ ID NO: 811 - RNA, 19 nt, Artificial Sequence
  Description of Artificial Sequence: Synthetic oligonucleotide
ccuccagccagaaggaugg

SEQ ID NO: 812 - RNA, 19 nt, Artificial Sequence
  Description of Artificial Sequence: Synthetic oligonucleotide
cuccagccagaaggauggg

SEQ ID NO: 813 - RNA, 19 nt, Artificial Sequence
  Description of Artificial Sequence: Synthetic oligonucleotide
uccagccagaaggaugggg

SEQ ID NO: 814 - RNA, 19 nt, Artificial Sequence
  Description of Artificial Sequence: Synthetic oligonucleotide
ccagccagaaggauggggu

SEQ ID NO: 815 - RNA, 19 nt, Artificial Sequence
  Description of Artificial Sequence: Synthetic oligonucleotide
cagccagaaggauggggug

SEQ ID NO: 816 - RNA, 19 nt, Artificial Sequence
  Description of Artificial Sequence: Synthetic oligonucleotide
agccagaaggauggggugg

SEQ ID NO: 817 - RNA, 19 nt, Artificial Sequence
  Description of Artificial Sequence: Synthetic oligonucleotide
gccagaaggaugggguggc

SEQ ID NO: 818 - RNA, 19 nt, Artificial Sequence
  Description of Artificial Sequence: Synthetic oligonucleotide
ccagaaggaugggguggcu

SEQ ID NO: 819 - RNA, 19 nt, Artificial Sequence
  Description of Artificial Sequence: Synthetic oligonucleotide
cagaaggaugggguggcuc

SEQ ID NO: 820 - RNA, 19 nt, Artificial Sequence
  Description of Artificial Sequence: Synthetic oligonucleotide
agaaggaugggguggcucc

SEQ ID NO: 821 - RNA, 19 nt, Artificial Sequence
  Description of Artificial Sequence: Synthetic oligonucleotide
gaaggaugggguggcuccc

SEQ ID NO: 822 - RNA, 19 nt, Artificial Sequence
  Description of Artificial Sequence: Synthetic oligonucleotide
aaggaugggguggcuccca

SEQ ID NO: 823 - RNA, 19 nt, Artificial Sequence
  Description of Artificial Sequence: Synthetic oligonucleotide
aggaugggguggcucccac

SEQ ID NO: 824 - RNA, 19 nt, Artificial Sequence
  Description of Artificial Sequence: Synthetic oligonucleotide
ggaugggguggcucccacu

SEQ ID NO: 825 - RNA, 19 nt, Artificial Sequence
  Description of Artificial Sequence: Synthetic oligonucleotide
gaugggguggcucccacuc

SEQ ID NO: 826 - RNA, 19 nt, Artificial Sequence
  Description of Artificial Sequence: Synthetic oligonucleotide
augggguggcucccacucc

SEQ ID NO: 827 - RNA, 19 nt, Artificial Sequence
  Description of Artificial Sequence: Synthetic oligonucleotide
ugggguggcucccacuccu

SEQ ID NO: 828 - RNA, 19 nt, Artificial Sequence
  Description of Artificial Sequence: Synthetic oligonucleotide
gggguggcucccacuccug

SEQ ID NO: 829 - RNA, 19 nt, Artificial Sequence
  Description of Artificial Sequence: Synthetic oligonucleotide
ggguggcucccacuccugc

SEQ ID NO: 830 - RNA, 19 nt, Artificial Sequence
  Description of Artificial Sequence: Synthetic oligonucleotide
gguggcucccacuccugcu

SEQ ID NO: 831 - RNA, 19 nt, Artificial Sequence
  Description of Artificial Sequence: Synthetic oligonucleotide
guggcucccacuccugcug

SEQ ID NO: 832 - RNA, 19 nt, Artificial Sequence
  Description of Artificial Sequence: Synthetic oligonucleotide
uggcucccacuccugcugc

SEQ ID NO: 833 - RNA, 19 nt, Artificial Sequence
  Description of Artificial Sequence: Synthetic oligonucleotide
ggcucccacuccugcugcu

SEQ ID NO: 834 - RNA, 19 nt, Artificial Sequence
  Description of Artificial Sequence: Synthetic oligonucleotide
gcucccacuccugcugcuu

SEQ ID NO: 835 - RNA, 19 nt, Artificial Sequence
  Description of Artificial Sequence: Synthetic oligonucleotide
cucccacuccugcugcuuc

SEQ ID NO: 836 - RNA, 19 nt, Artificial Sequence
  Description of Artificial Sequence: Synthetic oligonucleotide
ucccacuccugcugcuucu

SEQ ID NO: 837 - RNA, 19 nt, Artificial Sequence
  Description of Artificial Sequence: Synthetic oligonucleotide
cccacuccugcugcuucug

SEQ ID NO: 838 - RNA, 19 nt, Artificial Sequence
  Description of Artificial Sequence: Synthetic oligonucleotide
ccacuccugcugcuucuga

SEQ ID NO: 839 - RNA, 19 nt, Artificial Sequence
  Description of Artificial Sequence: Synthetic oligonucleotide
cacuccugcugcuucugac

SEQ ID NO: 840 - RNA, 19 nt, Artificial Sequence
  Description of Artificial Sequence: Synthetic oligonucleotide
acuccugcugcuucugacu

SEQ ID NO: 841 - RNA, 19 nt, Artificial Sequence
  Description of Artificial Sequence: Synthetic oligonucleotide
cuccugcugcuucugacuc

SEQ ID NO: 842 - RNA, 19 nt, Artificial Sequence
  Description of Artificial Sequence: Synthetic oligonucleotide
uccugcugcuucugacuca

SEQ ID NO: 843 - RNA, 19 nt, Artificial Sequence
  Description of Artificial Sequence: Synthetic oligonucleotide
ccugcugcuucugacucaa

SEQ ID NO: 844 - RNA, 19 nt, Artificial Sequence
  Description of Artificial Sequence: Synthetic oligonucleotide
cugcugcuucugacucaau

SEQ ID NO: 845 - RNA, 19 nt, Artificial Sequence
  Description of Artificial Sequence: Synthetic oligonucleotide
ugcugcuucugacucaaug

SEQ ID NO: 846 - RNA, 19 nt, Artificial Sequence
  Description of Artificial Sequence: Synthetic oligonucleotide
gcugcuucugacucaaugc

SEQ ID NO: 847 - RNA, 19 nt, Artificial Sequence
  Description of Artificial Sequence: Synthetic oligonucleotide
cugcuucugacucaaugcu

SEQ ID NO: 848 - RNA, 19 nt, Artificial Sequence
  Description of Artificial Sequence: Synthetic oligonucleotide
ugcuucugacucaaugcuu

SEQ ID NO: 849 - RNA, 19 nt, Artificial Sequence
  Description of Artificial Sequence: Synthetic oligonucleotide
gcuucugacucaaugcuua

SEQ ID NO: 850 - RNA, 19 nt, Artificial Sequence
  Description of Artificial Sequence: Synthetic oligonucleotide
cuucugacucaaugcuuag

SEQ ID NO: 851 - RNA, 19 nt, Artificial Sequence
  Description of Artificial Sequence: Synthetic oligonucleotide
uucugacucaaugcuuagg

SEQ ID NO: 852 - RNA, 19 nt, Artificial Sequence
  Description of Artificial Sequence: Synthetic oligonucleotide
ucugacucaaugcuuaggg

SEQ ID NO: 853 - RNA, 19 nt, Artificial Sequence
  Description of Artificial Sequence: Synthetic oligonucleotide
cugacucaaugcuuagggg

SEQ ID NO: 854 - RNA, 19 nt, Artificial Sequence
  Description of Artificial Sequence: Synthetic oligonucleotide
ugacucaaugcuuaggggu

SEQ ID NO: 855 - RNA, 19 nt, Artificial Sequence
  Description of Artificial Sequence: Synthetic oligonucleotide
gacucaaugcuuagggguc

SEQ ID NO: 856 - RNA, 19 nt, Artificial Sequence
  Description of Artificial Sequence: Synthetic oligonucleotide
acucaaugcuuaggggucc

SEQ ID NO: 857 - RNA, 19 nt, Artificial Sequence
  Description of Artificial Sequence: Synthetic oligonucleotide
cucaaugcuuagggguccc

SEQ ID NO: 858 - RNA, 19 nt, Artificial Sequence
  Description of Artificial Sequence: Synthetic oligonucleotide
ucaaugcuuaggggucccu

SEQ ID NO: 859 - RNA, 19 nt, Artificial Sequence
  Description of Artificial Sequence: Synthetic oligonucleotide
caaugcuuaggggucccug

SEQ ID NO: 860 - RNA, 19 nt, Artificial Sequence
  Description of Artificial Sequence: Synthetic oligonucleotide
aaugcuuaggggucccugg

SEQ ID NO: 861 - RNA, 19 nt, Artificial Sequence
  Description of Artificial Sequence: Synthetic oligonucleotide
augcuuaggggucccuggg

SEQ ID NO: 862 - RNA, 19 nt, Artificial Sequence
  Description of Artificial Sequence: Synthetic oligonucleotide
ugcuuaggggucccugggc

SEQ ID NO: 863 - RNA, 19 nt, Artificial Sequence
  Description of Artificial Sequence: Synthetic oligonucleotide
gcuuaggggucccugggca

SEQ ID NO: 864 - RNA, 19 nt, Artificial Sequence
  Description of Artificial Sequence: Synthetic oligonucleotide
cuuaggggucccugggcag

SEQ ID NO: 865 - RNA, 19 nt, Artificial Sequence
  Description of Artificial Sequence: Synthetic oligonucleotide
uuaggggucccugggcagc

SEQ ID NO: 866 - RNA, 19 nt, Artificial Sequence
  Description of Artificial Sequence: Synthetic oligonucleotide
uaggggucccugggcagcg

SEQ ID NO: 867 - RNA, 19 nt, Artificial Sequence
  Description of Artificial Sequence: Synthetic oligonucleotide
aggggucccugggcagcgc

SEQ ID NO: 868 - RNA, 19 nt, Artificial Sequence
  Description of Artificial Sequence: Synthetic oligonucleotide
ggggucccugggcagcgcu

SEQ ID NO: 869 - RNA, 19 nt, Artificial Sequence
  Description of Artificial Sequence: Synthetic oligonucleotide
gggucccugggcagcgcuc

SEQ ID NO: 870 - RNA, 19 nt, Artificial Sequence
  Description of Artificial Sequence: Synthetic oligonucleotide
ggucccugggcagcgcucg

SEQ ID NO: 871 - RNA, 19 nt, Artificial Sequence
  Description of Artificial Sequence: Synthetic oligonucleotide
gucccugggcagcgcucgc

SEQ ID NO: 872 - RNA, 19 nt, Artificial Sequence
  Description of Artificial Sequence: Synthetic oligonucleotide
ucccugggcagcgcucgcc

SEQ ID NO: 873 - RNA, 19 nt, Artificial Sequence
  Description of Artificial Sequence: Synthetic oligonucleotide
cccugggcagcgcucgcca

SEQ ID NO: 874 - RNA, 19 nt, Artificial Sequence
  Description of Artificial Sequence: Synthetic oligonucleotide
ccugggcagcgcucgccau

SEQ ID NO: 875 - RNA, 19 nt, Artificial Sequence
  Description of Artificial Sequence: Synthetic oligonucleotide
cugggcagcgcucgccauu

SEQ ID NO: 876 - RNA, 19 nt, Artificial Sequence
  Description of Artificial Sequence: Synthetic oligonucleotide
ugggcagcgcucgccauug

SEQ ID NO: 877 - RNA, 19 nt, Artificial Sequence
  Description of Artificial Sequence: Synthetic oligonucleotide
gggcagcgcucgccauuga

SEQ ID NO: 878 - RNA, 19 nt, Artificial Sequence
  Description of Artificial Sequence: Synthetic oligonucleotide
ggcagcgcucgccauugaa

SEQ ID NO: 879 - RNA, 19 nt, Artificial Sequence
  Description of Artificial Sequence: Synthetic oligonucleotide
gcagcgcucgccauugaau

SEQ ID NO: 880 - RNA, 19 nt, Artificial Sequence
  Description of Artificial Sequence: Synthetic oligonucleotide
cagcgcucgccauugaaug

SEQ ID NO: 881 - RNA, 19 nt, Artificial Sequence
  Description of Artificial Sequence: Synthetic oligonucleotide
agcgcucgccauugaauga

SEQ ID NO: 882 - RNA, 19 nt, Artificial Sequence
  Description of Artificial Sequence: Synthetic oligonucleotide
gcgcucgccauugaaugac

SEQ ID NO: 883 - RNA, 19 nt, Artificial Sequence
  Description of Artificial Sequence: Synthetic oligonucleotide
cgcucgccauugaaugacu

SEQ ID NO: 884 - RNA, 19 nt, Artificial Sequence
  Description of Artificial Sequence: Synthetic oligonucleotide
gcucgccauugaaugacuu

SEQ ID NO: 885 - RNA, 19 nt, Artificial Sequence
  Description of Artificial Sequence: Synthetic oligonucleotide
cucgccauugaaugacuuc

SEQ ID NO: 886 - RNA, 19 nt, Artificial Sequence
  Description of Artificial Sequence: Synthetic oligonucleotide
ucgccauugaaugacuucc

SEQ ID NO: 887 - RNA, 19 nt, Artificial Sequence
  Description of Artificial Sequence: Synthetic oligonucleotide
cgccauugaaugacuucca

SEQ ID NO: 888 - RNA, 19 nt, Artificial Sequence
  Description of Artificial Sequence: Synthetic oligonucleotide
gccauugaaugacuuccaa

SEQ ID NO: 889 - RNA, 19 nt, Artificial Sequence
  Description of Artificial Sequence: Synthetic oligonucleotide
ccauugaaugacuuccaag

SEQ ID NO: 890 - RNA, 19 nt, Artificial Sequence
  Description of Artificial Sequence: Synthetic oligonucleotide
cauugaaugacuuccaagu

SEQ ID NO: 891 - RNA, 19 nt, Artificial Sequence
  Description of Artificial Sequence: Synthetic oligonucleotide
auugaaugacuuccaagug

SEQ ID NO: 892 - RNA, 19 nt, Artificial Sequence
  Description of Artificial Sequence: Synthetic oligonucleotide
uugaaugacuuccaagugc

SEQ ID NO: 893 - RNA, 19 nt, Artificial Sequence
  Description of Artificial Sequence: Synthetic oligonucleotide
ugaaugacuuccaagugcu

SEQ ID NO: 894 - RNA, 19 nt, Artificial Sequence
  Description of Artificial Sequence: Synthetic oligonucleotide
gaaugacuuccaagugcuc

SEQ ID NO: 895 - RNA, 19 nt, Artificial Sequence
  Description of Artificial Sequence: Synthetic oligonucleotide
aaugacuuccaagugcucc

SEQ ID NO: 896 - RNA, 19 nt, Artificial Sequence
  Description of Artificial Sequence: Synthetic oligonucleotide
augacuuccaagugcuccg

SEQ ID NO: 897 - RNA, 19 nt, Artificial Sequence
  Description of Artificial Sequence: Synthetic oligonucleotide
ugacuuccaagugcuccgg

SEQ ID NO: 898 - RNA, 19 nt, Artificial Sequence
  Description of Artificial Sequence: Synthetic oligonucleotide
gacuuccaagugcuccggg

SEQ ID NO: 899 - RNA, 19 nt, Artificial Sequence
  Description of Artificial Sequence: Synthetic oligonucleotide
acuuccaagugcuccgggg

SEQ ID NO: 900 - RNA, 19 nt, Artificial Sequence
  Description of Artificial Sequence: Synthetic oligonucleotide
cuuccaagugcuccggggc

SEQ ID NO: 901 - RNA, 19 nt, Artificial Sequence
  Description of Artificial Sequence: Synthetic oligonucleotide
uuccaagugcuccggggca

SEQ ID NO: 902 - RNA, 19 nt, Artificial Sequence
  Description of Artificial Sequence: Synthetic oligonucleotide
uccaagugcuccggggcac

SEQ ID NO: 903 - RNA, 19 nt, Artificial Sequence
  Description of Artificial Sequence: Synthetic oligonucleotide
ccaagugcuccggggcaca

SEQ ID NO: 904 - RNA, 19 nt, Artificial Sequence
  Description of Artificial Sequence: Synthetic oligonucleotide
caagugcuccggggcacag

SEQ ID NO: 905 - RNA, 19 nt, Artificial Sequence
  Description of Artificial Sequence: Synthetic oligonucleotide
aagugcuccggggcacaga

SEQ ID NO: 906 - RNA, 19 nt, Artificial Sequence
  Description of Artificial Sequence: Synthetic oligonucleotide
agugcuccggggcacagag

SEQ ID NO: 907 - RNA, 19 nt, Artificial Sequence
  Description of Artificial Sequence: Synthetic oligonucleotide
gugcuccggggcacagagc

SEQ ID NO: 908 - RNA, 19 nt, Artificial Sequence
  Description of Artificial Sequence: Synthetic oligonucleotide
ugcuccggggcacagagcu

SEQ ID NO: 909 - RNA, 19 nt, Artificial Sequence
  Description of Artificial Sequence: Synthetic oligonucleotide
gcuccggggcacagagcua

SEQ ID NO: 910 - RNA, 19 nt, Artificial Sequence
  Description of Artificial Sequence: Synthetic oligonucleotide
cuccggggcacagagcuac

SEQ ID NO: 911 - RNA, 19 nt, Artificial Sequence
  Description of Artificial Sequence: Synthetic oligonucleotide
uccggggcacagagcuaca

SEQ ID NO: 912 - RNA, 19 nt, Artificial Sequence
  Description of Artificial Sequence: Synthetic oligonucleotide
ccggggcacagagcuacag

SEQ ID NO: 913 - RNA, 19 nt, Artificial Sequence
  Description of Artificial Sequence: Synthetic oligonucleotide
cggggcacagagcuacagc

SEQ ID NO: 914 - RNA, 19 nt, Artificial Sequence
  Description of Artificial Sequence: Synthetic oligonucleotide
ggggcacagagcuacagca

SEQ ID NO: 915 - RNA, 19 nt, Artificial Sequence
  Description of Artificial Sequence: Synthetic oligonucleotide
gggcacagagcuacagcac

SEQ ID NO: 916 - RNA, 19 nt, Artificial Sequence
  Description of Artificial Sequence: Synthetic oligonucleotide
ggcacagagcuacagcacc

SEQ ID NO: 917 - RNA, 19 nt, Artificial Sequence
  Description of Artificial Sequence: Synthetic oligonucleotide
gcacagagcuacagcaccu

SEQ ID NO: 918 - RNA, 19 nt, Artificial Sequence
  Description of Artificial Sequence: Synthetic oligonucleotide
cacagagcuacagcaccug

SEQ ID NO: 919 - RNA, 19 nt, Artificial Sequence
  Description of Artificial Sequence: Synthetic oligonucleotide
acagagcuacagcaccugc

SEQ ID NO: 920 - RNA, 19 nt, Artificial Sequence
  Description of Artificial Sequence: Synthetic oligonucleotide
cagagcuacagcaccugcu

SEQ ID NO: 921 - RNA, 19 nt, Artificial Sequence
  Description of Artificial Sequence: Synthetic oligonucleotide
agagcuacagcaccugcua

SEQ ID NO: 922 - RNA, 19 nt, Artificial Sequence
  Description of Artificial Sequence: Synthetic oligonucleotide
gagcuacagcaccugcuac

SEQ ID NO: 923 - RNA, 19 nt, Artificial Sequence
  Description of Artificial Sequence: Synthetic oligonucleotide
agcuacagcaccugcuaca

SEQ ID NO: 924 - RNA, 19 nt, Artificial Sequence
  Description of Artificial Sequence: Synthetic oligonucleotide
gcuacagcaccugcuacau

SEQ ID NO: 925 - RNA, 19 nt, Artificial Sequence
  Description of Artificial Sequence: Synthetic oligonucleotide
cuacagcaccugcuacaug

SEQ ID NO: 926 - RNA, 19 nt, Artificial Sequence
  Description of Artificial Sequence: Synthetic oligonucleotide
uacagcaccugcuacaugc

SEQ ID NO: 927 - RNA, 19 nt, Artificial Sequence
  Description of Artificial Sequence: Synthetic oligonucleotide
acagcaccugcuacaugcg

SEQ ID NO: 928 - RNA, 19 nt, Artificial Sequence
  Description of Artificial Sequence: Synthetic oligonucleotide
cagcaccugcuacaugcgg

SEQ ID NO: 929 - RNA, 19 nt, Artificial Sequence
  Description of Artificial Sequence: Synthetic oligonucleotide
agcaccugcuacaugcggu

SEQ ID NO: 930 - RNA, 19 nt, Artificial Sequence
  Description of Artificial Sequence: Synthetic oligonucleotide
gcaccugcuacaugcggug

SEQ ID NO: 931 - RNA, 19 nt, Artificial Sequence
  Description of Artificial Sequence: Synthetic oligonucleotide
caccugcuacaugcggugg

SEQ ID NO: 932 - RNA, 19 nt, Artificial Sequence
  Description of Artificial Sequence: Synthetic oligonucleotide
accugcuacaugcgguggu

SEQ ID NO: 933 - RNA, 19 nt, Artificial Sequence
  Description of Artificial Sequence: Synthetic oligonucleotide
ccugcuacaugcgguggug

SEQ ID NO: 934 - RNA, 19 nt, Artificial Sequence
  Description of Artificial Sequence: Synthetic oligonucleotide
cugcuacaugcgguggugc

SEQ ID NO: 935 - RNA, 19 nt, Artificial Sequence
  Description of Artificial Sequence: Synthetic oligonucleotide
ugcuacaugcgguggugcc

SEQ ID NO: 936 - RNA, 19 nt, Artificial Sequence
  Description of Artificial Sequence: Synthetic oligonucleotide
gcuacaugcgguggugccc

SEQ ID NO: 937 - RNA, 19 nt, Artificial Sequence
  Description of Artificial Sequence: Synthetic oligonucleotide
cuacaugcgguggugcccg

SEQ ID NO: 938 - RNA, 19 nt, Artificial Sequence
  Description of Artificial Sequence: Synthetic oligonucleotide
uacaugcgguggugcccgg

SEQ ID NO: 939 - RNA, 19 nt, Artificial Sequence
  Description of Artificial Sequence: Synthetic oligonucleotide
acaugcgguggugcccggg

SEQ ID NO: 940 - RNA, 19 nt, Artificial Sequence
  Description of Artificial Sequence: Synthetic oligonucleotide
caugcgguggugcccgggc

SEQ ID NO: 941 - RNA, 19 nt, Artificial Sequence
  Description of Artificial Sequence: Synthetic oligonucleotide
augcgguggugcccgggcc

SEQ ID NO: 942 - RNA, 19 nt, Artificial Sequence
  Description of Artificial Sequence: Synthetic oligonucleotide
ugcgguggugcccgggccu

SEQ ID NO: 943 - RNA, 19 nt, Artificial Sequence
  Description of Artificial Sequence: Synthetic oligonucleotide
gcgguggugcccgggccuu

SEQ ID NO: 944 - RNA, 19 nt, Artificial Sequence
  Description of Artificial Sequence: Synthetic oligonucleotide
cgguggugcccgggccuug

SEQ ID NO: 945 - RNA, 19 nt, Artificial Sequence
  Description of Artificial Sequence: Synthetic oligonucleotide
gguggugcccgggccuugg

SEQ ID NO: 946 - RNA, 19 nt, Artificial Sequence
  Description of Artificial Sequence: Synthetic oligonucleotide
guggugcccgggccuuggc

SEQ ID NO: 947 - RNA, 19 nt, Artificial Sequence
  Description of Artificial Sequence: Synthetic oligonucleotide
uggugcccgggccuuggca

SEQ ID NO: 948 - RNA, 19 nt, Artificial Sequence
  Description of Artificial Sequence: Synthetic oligonucleotide
ggugcccgggccuuggcag

SEQ ID NO: 949 - RNA, 19 nt, Artificial Sequence
  Description of Artificial Sequence: Synthetic oligonucleotide
gugcccgggccuuggcagg

SEQ ID NO: 950 - RNA, 19 nt, Artificial Sequence
  Description of Artificial Sequence: Synthetic oligonucleotide
ugcccgggccuuggcagga

SEQ ID NO: 951 - RNA, 19 nt, Artificial Sequence
  Description of Artificial Sequence: Synthetic oligonucleotide
gcccgggccuuggcaggag

SEQ ID NO: 952 - RNA, 19 nt, Artificial Sequence
  Description of Artificial Sequence: Synthetic oligonucleotide
cccgggccuuggcaggagg

SEQ ID NO: 953 - RNA, 19 nt, Artificial Sequence
  Description of Artificial Sequence: Synthetic oligonucleotide
ccgggccuuggcaggagga

SEQ ID NO: 954 - RNA, 19 nt, Artificial Sequence
  Description of Artificial Sequence: Synthetic oligonucleotide
cgggccuuggcaggaggau

SEQ ID NO: 955 - RNA, 19 nt, Artificial Sequence
  Description of Artificial Sequence: Synthetic oligonucleotide
gggccuuggcaggaggaug

SEQ ID NO: 956 - RNA, 19 nt, Artificial Sequence
  Description of Artificial Sequence: Synthetic oligonucleotide
ggccuuggcaggaggaugu

SEQ ID NO: 957 - RNA, 19 nt, Artificial Sequence
  Description of Artificial Sequence: Synthetic oligonucleotide
gccuuggcaggaggaugug

SEQ ID NO: 958 - RNA, 19 nt, Artificial Sequence
  Description of Artificial Sequence: Synthetic oligonucleotide
ccuuggcaggaggaugugg

SEQ ID NO: 959 - RNA, 19 nt, Artificial Sequence
  Description of Artificial Sequence: Synthetic oligonucleotide
cuuggcaggaggauguggc

SEQ ID NO: 960 - RNA, 19 nt, Artificial Sequence
  Description of Artificial Sequence: Synthetic oligonucleotide
uuggcaggaggauguggca

SEQ ID NO: 961 - RNA, 19 nt, Artificial Sequence
  Description of Artificial Sequence: Synthetic oligonucleotide
uggcaggaggauguggcag

SEQ ID NO: 962 - RNA, 19 nt, Artificial Sequence
  Description of Artificial Sequence: Synthetic oligonucleotide
ggcaggaggauguggcaga

SEQ ID NO: 963 - RNA, 19 nt, Artificial Sequence
  Description of Artificial Sequence: Synthetic oligonucleotide
gcaggaggauguggcagau

SEQ ID NO: 964 - RNA, 19 nt, Artificial Sequence
  Description of Artificial Sequence: Synthetic oligonucleotide
caggaggauguggcagaug

SEQ ID NO: 965 - RNA, 19 nt, Artificial Sequence
  Description of Artificial Sequence: Synthetic oligonucleotide
aggaggauguggcagaugc

SEQ ID NO: 966 - RNA, 19 nt, Artificial Sequence
  Description of Artificial Sequence: Synthetic oligonucleotide
ggaggauguggcagaugcu

SEQ ID NO: 967 - RNA, 19 nt, Artificial Sequence
  Description of Artificial Sequence: Synthetic oligonucleotide
gaggauguggcagaugcug

SEQ ID NO: 968 - RNA, 19 nt, Artificial Sequence
  Description of Artificial Sequence: Synthetic oligonucleotide
aggauguggcagaugcuga

SEQ ID NO: 969 - RNA, 19 nt, Artificial Sequence
  Description of Artificial Sequence: Synthetic oligonucleotide
ggauguggcagaugcugaa

SEQ ID NO: 970 - RNA, 19 nt, Artificial Sequence
  Description of Artificial Sequence: Synthetic oligonucleotide
gauguggcagaugcugaag

SEQ ID NO: 971 - RNA, 19 nt, Artificial Sequence
  Description of Artificial Sequence: Synthetic oligonucleotide
auguggcagaugcugaaga

SEQ ID NO: 972 - RNA, 19 nt, Artificial Sequence
  Description of Artificial Sequence: Synthetic oligonucleotide
uguggcagaugcugaagag

SEQ ID NO: 973 - RNA, 19 nt, Artificial Sequence
  Description of Artificial Sequence: Synthetic oligonucleotide
guggcagaugcugaagagu

SEQ ID NO: 974 - RNA, 19 nt, Artificial Sequence
  Description of Artificial Sequence: Synthetic oligonucleotide
uggcagaugcugaagagug

SEQ ID NO: 975 - RNA, 19 nt, Artificial Sequence
  Description of Artificial Sequence: Synthetic oligonucleotide
ggcagaugcugaagagugu

SEQ ID NO: 976 - RNA, 19 nt, Artificial Sequence
  Description of Artificial Sequence: Synthetic oligonucleotide
gcagaugcugaagagugug

SEQ ID NO: 977 - RNA, 19 nt, Artificial Sequence
  Description of Artificial Sequence: Synthetic oligonucleotide
cagaugcugaagagugugc

SEQ ID NO: 978 - RNA, 19 nt, Artificial Sequence
  Description of Artificial Sequence: Synthetic oligonucleotide
agaugcugaagagugugcu

SEQ ID NO: 979 - RNA, 19 nt, Artificial Sequence
  Description of Artificial Sequence: Synthetic oligonucleotide
gaugcugaagagugugcug

SEQ ID NO: 980 - RNA, 19 nt, Artificial Sequence
  Description of Artificial Sequence: Synthetic oligonucleotide
augcugaagagugugcugg

SEQ ID NO: 981 - RNA, 19 nt, Artificial Sequence
  Description of Artificial Sequence: Synthetic oligonucleotide
ugcugaagagugugcuggu

SEQ ID NO: 982 - RNA, 19 nt, Artificial Sequence
  Description of Artificial Sequence: Synthetic oligonucleotide
gcugaagagugugcugguc

SEQ ID NO: 983 - RNA, 19 nt, Artificial Sequence
  Description of Artificial Sequence: Synthetic oligonucleotide
cugaagagugugcuggucg

SEQ ID NO: 984 - RNA, 19 nt, Artificial Sequence
  Description of Artificial Sequence: Synthetic oligonucleotide
ugaagagugugcuggucgc

SEQ ID NO: 985 - RNA, 19 nt, Artificial Sequence
  Description of Artificial Sequence: Synthetic oligonucleotide
gaagagugugcuggucgcu

SEQ ID NO: 986 - RNA, 19 nt, Artificial Sequence
  Description of Artificial Sequence: Synthetic oligonucleotide
aagagugugcuggucgcug

SEQ ID NO: 987 - RNA, 19 nt, Artificial Sequence
  Description of Artificial Sequence: Synthetic oligonucleotide
agagugugcuggucgcugu

SEQ ID NO: 988 - RNA, 19 nt, Artificial Sequence
  Description of Artificial Sequence: Synthetic oligonucleotide
gagugugcuggucgcugug

SEQ ID NO: 989 - RNA, 19 nt, Artificial Sequence
  Description of Artificial Sequence: Synthetic oligonucleotide
agugugcuggucgcugugg

SEQ ID NO: 990 - RNA, 19 nt, Artificial Sequence
  Description of Artificial Sequence: Synthetic oligonucleotide
gugugcuggucgcuguggg

SEQ ID NO: 991 - RNA, 19 nt, Artificial Sequence
  Description of Artificial Sequence: Synthetic oligonucleotide
ugugcuggucgcugugggc

SEQ ID NO: 992 - RNA, 19 nt, Artificial Sequence
  Description of Artificial Sequence: Synthetic oligonucleotide
gugcuggucgcugugggcc

SEQ ID NO: 993 - RNA, 19 nt, Artificial Sequence
  Description of Artificial Sequence: Synthetic oligonucleotide
ugcuggucgcugugggccc

SEQ ID NO: 994 - RNA, 19 nt, Artificial Sequence
  Description of Artificial Sequence: Synthetic oligonucleotide
gcuggucgcugugggcccu

SEQ ID NO: 995 - RNA, 19 nt, Artificial Sequence
  Description of Artificial Sequence: Synthetic oligonucleotide
cuggucgcugugggcccuu

SEQ ID NO: 996 - RNA, 19 nt, Artificial Sequence
  Description of Artificial Sequence: Synthetic oligonucleotide
uggucgcugugggcccuua

SEQ ID NO: 997 - RNA, 19 nt, Artificial Sequence
  Description of Artificial Sequence: Synthetic oligonucleotide
ggucgcugugggcccuuaa

SEQ ID NO: 998 - RNA, 19 nt, Artificial Sequence
  Description of Artificial Sequence: Synthetic oligonucleotide
gucgcugugggcccuuaau

SEQ ID NO: 999 - RNA, 19 nt, Artificial Sequence
  Description of Artificial Sequence: Synthetic oligonucleotide
ucgcugugggcccuuaaug

SEQ ID NO: 1000 - RNA, 19 nt, Artificial Sequence
  Description of Artificial Sequence: Synthetic oligonucleotide
cgcugugggcccuuaaugg

SEQ ID NO: 1001 - RNA, 19 nt, Artificial Sequence
  Description of Artificial Sequence: Synthetic oligonucleotide
gcugugggcccuuaaugga

SEQ ID NO: 1002 - RNA, 19 nt, Artificial Sequence
  Description of Artificial Sequence: Synthetic oligonucleotide
cugugggcccuuaauggac

SEQ ID NO: 1003 - RNA, 19 nt, Artificial Sequence
  Description of Artificial Sequence: Synthetic oligonucleotide
ugugggcccuuaauggacu

SEQ ID NO: 1004 - RNA, 19 nt, Artificial Sequence
  Description of Artificial Sequence: Synthetic oligonucleotide
gugggcccuuaauggacug

SEQ ID NO: 1005 - RNA, 19 nt, Artificial Sequence
  Description of Artificial Sequence: Synthetic oligonucleotide
ugggcccuuaauggacugc

SEQ ID NO: 1006 - RNA, 19 nt, Artificial Sequence
  Description of Artificial Sequence: Synthetic oligonucleotide
gggcccuuaauggacugcc

SEQ ID NO: 1007 - RNA, 19 nt, Artificial Sequence
  Description of Artificial Sequence: Synthetic oligonucleotide
ggcccuuaauggacugccg

SEQ ID NO: 1008 - RNA, 19 nt, Artificial Sequence
  Description of Artificial Sequence: Synthetic oligonucleotide
gcccuuaauggacugccgg

SEQ ID NO: 1009 - RNA, 19 nt, Artificial Sequence
  Description of Artificial Sequence: Synthetic oligonucleotide
cccuuaauggacugccggg

SEQ ID NO: 1010 - RNA, 19 nt, Artificial Sequence
  Description of Artificial Sequence: Synthetic oligonucleotide
ccuuaauggacugccgggc

SEQ ID NO: 1011 - RNA, 19 nt, Artificial Sequence
  Description of Artificial Sequence: Synthetic oligonucleotide
cuuaauggacugccgggcc

SEQ ID NO: 1012 - RNA, 19 nt, Artificial Sequence
  Description of Artificial Sequence: Synthetic oligonucleotide
uuaauggacugccgggccu

SEQ ID NO: 1013 - RNA, 19 nt, Artificial Sequence
  Description of Artificial Sequence: Synthetic oligonucleotide
uaauggacugccgggccuu

SEQ ID NO: 1014 - RNA, 19 nt, Artificial Sequence
  Description of Artificial Sequence: Synthetic oligonucleotide
aauggacugccgggccuuc

SEQ ID NO: 1015 - RNA, 19 nt, Artificial Sequence
  Description of Artificial Sequence: Synthetic oligonucleotide
auggacugccgggccuucc

SEQ ID NO: 1016 - RNA, 19 nt, Artificial Sequence
  Description of Artificial Sequence: Synthetic oligonucleotide
uggacugccgggccuucca

SEQ ID NO: 1017 - RNA, 19 nt, Artificial Sequence
  Description of Artificial Sequence: Synthetic oligonucleotide
ggacugccgggccuuccac

SEQ ID NO: 1018 - RNA, 19 nt, Artificial Sequence
  Description of Artificial Sequence: Synthetic oligonucleotide
gacugccgggccuuccacu

SEQ ID NO: 1019 - RNA, 19 nt, Artificial Sequence
  Description of Artificial Sequence: Synthetic oligonucleotide
acugccgggccuuccacua

SEQ ID NO: 1020 - RNA, 19 nt, Artificial Sequence
  Description of Artificial Sequence: Synthetic oligonucleotide
cugccgggccuuccacuac

SEQ ID NO: 1021 - RNA, 19 nt, Artificial Sequence
  Description of Artificial Sequence: Synthetic oligonucleotide
ugccgggccuuccacuaca

SEQ ID NO: 1022 - RNA, 19 nt, Artificial Sequence
  Description of Artificial Sequence: Synthetic oligonucleotide
gccgggccuuccacuacaa

SEQ ID NO: 1023 - RNA, 19 nt, Artificial Sequence
  Description of Artificial Sequence: Synthetic oligonucleotide
ccgggccuuccacuacaac

SEQ ID NO: 1024 - RNA, 19 nt, Artificial Sequence
  Description of Artificial Sequence: Synthetic oligonucleotide
cgggccuuccacuacaacg

SEQ ID NO: 1025 - RNA, 19 nt, Artificial Sequence
  Description of Artificial Sequence: Synthetic oligonucleotide
gggccuuccacuacaacgu

SEQ ID NO: 1026 - RNA, 19 nt, Artificial Sequence
  Description of Artificial Sequence: Synthetic oligonucleotide
ggccuuccacuacaacgug

SEQ ID NO: 1027 - RNA, 19 nt, Artificial Sequence
  Description of Artificial Sequence: Synthetic oligonucleotide
gccuuccacuacaacguga

SEQ ID NO: 1028 - RNA, 19 nt, Artificial Sequence
  Description of Artificial Sequence: Synthetic oligonucleotide
ccuuccacuacaacgugag

SEQ ID NO: 1029 - RNA, 19 nt, Artificial Sequence
  Description of Artificial Sequence: Synthetic oligonucleotide
cuuccacuacaacgugagc

SEQ ID NO: 1030 - RNA, 19 nt, Artificial Sequence
  Description of Artificial Sequence: Synthetic oligonucleotide
uuccacuacaacgugagca

SEQ ID NO: 1031 - RNA, 19 nt, Artificial Sequence
  Description of Artificial Sequence: Synthetic oligonucleotide
uccacuacaacgugagcag

SEQ ID NO: 1032 - RNA, 19 nt, Artificial Sequence
  Description of Artificial Sequence: Synthetic oligonucleotide
ccacuacaacgugagcagc

SEQ ID NO: 1033 - RNA, 19 nt, Artificial Sequence
  Description of Artificial Sequence: Synthetic oligonucleotide
cacuacaacgugagcagcc

SEQ ID NO: 1034 - RNA, 19 nt, Artificial Sequence
  Description of Artificial Sequence: Synthetic oligonucleotide
acuacaacgugagcagcca

SEQ ID NO: 1035 - RNA, 19 nt, Artificial Sequence
  Description of Artificial Sequence: Synthetic oligonucleotide
cuacaacgugagcagccau

SEQ ID NO: 1036 - RNA, 19 nt, Artificial Sequence
  Description of Artificial Sequence: Synthetic oligonucleotide
uacaacgugagcagccaug

SEQ ID NO: 1037 - RNA, 19 nt, Artificial Sequence
  Description of Artificial Sequence: Synthetic oligonucleotide
acaacgugagcagccaugg

SEQ ID NO: 1038 - RNA, 19 nt, Artificial Sequence
  Description of Artificial Sequence: Synthetic oligonucleotide
caacgugagcagccauggu

SEQ ID NO: 1039 - RNA, 19 nt, Artificial Sequence
  Description of Artificial Sequence: Synthetic oligonucleotide
aacgugagcagccaugguu

SEQ ID NO: 1040 - RNA, 19 nt, Artificial Sequence
  Description of Artificial Sequence: Synthetic oligonucleotide
acgugagcagccaugguug

SEQ ID NO: 1041 - RNA, 19 nt, Artificial Sequence
  Description of Artificial Sequence: Synthetic oligonucleotide
cgugagcagccaugguugc

SEQ ID NO: 1042 - RNA, 19 nt, Artificial Sequence
  Description of Artificial Sequence: Synthetic oligonucleotide
gugagcagccaugguugcc

SEQ ID NO: 1043 - RNA, 19 nt, Artificial Sequence
  Description of Artificial Sequence: Synthetic oligonucleotide
ugagcagccaugguugcca

SEQ ID NO: 1044 - RNA, 19 nt, Artificial Sequence
  Description of Artificial Sequence: Synthetic oligonucleotide
gagcagccaugguugccaa

SEQ ID NO: 1045 - RNA, 19 nt, Artificial Sequence
  Description of Artificial Sequence: Synthetic oligonucleotide
agcagccaugguugccaac

SEQ ID NO: 1046 - RNA, 19 nt, Artificial Sequence
  Description of Artificial Sequence: Synthetic oligonucleotide
gcagccaugguugccaacu

SEQ ID NO: 1047 - RNA, 19 nt, Artificial Sequence
  Description of Artificial Sequence: Synthetic oligonucleotide
cagccaugguugccaacug

SEQ ID NO: 1048 - RNA, 19 nt, Artificial Sequence
  Description of Artificial Sequence: Synthetic oligonucleotide
agccaugguugccaacugc

SEQ ID NO: 1049 - RNA, 19 nt, Artificial Sequence
  Description of Artificial Sequence: Synthetic oligonucleotide
gccaugguugccaacugcu

SEQ ID NO: 1050 - RNA, 19 nt, Artificial Sequence
  Description of Artificial Sequence: Synthetic oligonucleotide
ccaugguugccaacugcug

SEQ ID NO: 1051 - RNA, 19 nt, Artificial Sequence
  Description of Artificial Sequence: Synthetic oligonucleotide
caugguugccaacugcugc

SEQ ID NO: 1052 - RNA, 19 nt, Artificial Sequence
  Description of Artificial Sequence: Synthetic oligonucleotide
augguugccaacugcugcc

SEQ ID NO: 1053 - RNA, 19 nt, Artificial Sequence
  Description of Artificial Sequence: Synthetic oligonucleotide
ugguugccaacugcugcca

SEQ ID NO: 1054 - RNA, 19 nt, Artificial Sequence
  Description of Artificial Sequence: Synthetic oligonucleotide
gguugccaacugcugccau

SEQ ID NO: 1055 - RNA, 19 nt, Artificial Sequence
  Description of Artificial Sequence: Synthetic oligonucleotide
guugccaacugcugccaug

SEQ ID NO: 1056 - RNA, 19 nt, Artificial Sequence
  Description of Artificial Sequence: Synthetic oligonucleotide
uugccaacugcugccaugg

SEQ ID NO: 1057 - RNA, 19 nt, Artificial Sequence
  Description of Artificial Sequence: Synthetic oligonucleotide
ugccaacugcugccaugga

SEQ ID NO: 1058 - RNA, 19 nt, Artificial Sequence
  Description of Artificial Sequence: Synthetic oligonucleotide
gccaacugcugccauggac

SEQ ID NO: 1059 - RNA, 19 nt, Artificial Sequence
  Description of Artificial Sequence: Synthetic oligonucleotide
ccaacugcugccauggacu

SEQ ID NO: 1060 - RNA, 19 nt, Artificial Sequence
  Description of Artificial Sequence: Synthetic oligonucleotide
caacugcugccauggacuc

SEQ ID NO: 1061 - RNA, 19 nt, Artificial Sequence
  Description of Artificial Sequence: Synthetic oligonucleotide
aacugcugccauggacuca

SEQ ID NO: 1062 - RNA, 19 nt, Artificial Sequence
  Description of Artificial Sequence: Synthetic oligonucleotide
acugcugccauggacucaa

SEQ ID NO: 1063 - RNA, 19 nt, Artificial Sequence
  Description of Artificial Sequence: Synthetic oligonucleotide
cugcugccauggacucaac

SEQ ID NO: 1064 - RNA, 19 nt, Artificial Sequence
  Description of Artificial Sequence: Synthetic oligonucleotide
ugcugccauggacucaaca

SEQ ID NO: 1065 - RNA, 19 nt, Artificial Sequence
  Description of Artificial Sequence: Synthetic oligonucleotide
gcugccauggacucaacac

SEQ ID NO: 1066 - RNA, 19 nt, Artificial Sequence
  Description of Artificial Sequence: Synthetic oligonucleotide
cugccauggacucaacacu

SEQ ID NO: 1067 - RNA, 19 nt, Artificial Sequence
  Description of Artificial Sequence: Synthetic oligonucleotide
ugccauggacucaacacuc

SEQ ID NO: 1068 - RNA, 19 nt, Artificial Sequence
  Description of Artificial Sequence: Synthetic oligonucleotide
gccauggacucaacacucg

SEQ ID NO: 1069 - RNA, 19 nt, Artificial Sequence
  Description of Artificial Sequence: Synthetic oligonucleotide
ccauggacucaacacucgc

SEQ ID NO: 1070 - RNA, 19 nt, Artificial Sequence
  Description of Artificial Sequence: Synthetic oligonucleotide
cauggacucaacacucgcc

SEQ ID NO: 1071 - RNA, 19 nt, Artificial Sequence
  Description of Artificial Sequence: Synthetic oligonucleotide
auggacucaacacucgccc

SEQ ID NO: 1072 - RNA, 19 nt, Artificial Sequence
  Description of Artificial Sequence: Synthetic oligonucleotide
uggacucaacacucgcccc

SEQ ID NO: 1073 - RNA, 19 nt, Artificial Sequence
  Description of Artificial Sequence: Synthetic oligonucleotide
ggacucaacacucgcccca

SEQ ID NO: 1074 - RNA, 19 nt, Artificial Sequence
  Description of Artificial Sequence: Synthetic oligonucleotide
gacucaacacucgccccac

SEQ ID NO: 1075 - RNA, 19 nt, Artificial Sequence
  Description of Artificial Sequence: Synthetic oligonucleotide
acucaacacucgccccaca

SEQ ID NO: 1076 - RNA, 19 nt, Artificial Sequence
  Description of Artificial Sequence: Synthetic oligonucleotide
cucaacacucgccccacac

SEQ ID NO: 1077 - RNA, 19 nt, Artificial Sequence
  Description of Artificial Sequence: Synthetic oligonucleotide
ucaacacucgccccacacg

SEQ ID NO: 1078 - RNA, 19 nt, Artificial Sequence
  Description of Artificial Sequence: Synthetic oligonucleotide
caacacucgccccacacga

SEQ ID NO: 1079 - RNA, 19 nt, Artificial Sequence
  Description of Artificial Sequence: Synthetic oligonucleotide
aacacucgccccacacgag

SEQ ID NO: 1080 - RNA, 19 nt, Artificial Sequence
  Description of Artificial Sequence: Synthetic oligonucleotide
acacucgccccacacgagg

SEQ ID NO: 1081 - RNA, 19 nt, Artificial Sequence
  Description of Artificial Sequence: Synthetic oligonucleotide
cacucgccccacacgaggc

SEQ ID NO: 1082 - RNA, 19 nt, Artificial Sequence
  Description of Artificial Sequence: Synthetic oligonucleotide
acucgccccacacgaggcu

SEQ ID NO: 1083 - RNA, 19 nt, Artificial Sequence
  Description of Artificial Sequence: Synthetic oligonucleotide
cucgccccacacgaggcug

SEQ ID NO: 1084 - RNA, 19 nt, Artificial Sequence
  Description of Artificial Sequence: Synthetic oligonucleotide
ucgccccacacgaggcugc

SEQ ID NO: 1085 - RNA, 19 nt, Artificial Sequence
  Description of Artificial Sequence: Synthetic oligonucleotide
cgccccacacgaggcugcg

SEQ ID NO: 1086 - RNA, 19 nt, Artificial Sequence
  Description of Artificial Sequence: Synthetic oligonucleotide
gccccacacgaggcugcgg

SEQ ID NO: 1087 - RNA, 19 nt, Artificial Sequence
  Description of Artificial Sequence: Synthetic oligonucleotide
ccccacacgaggcugcggc

SEQ ID NO: 1088 - RNA, 19 nt, Artificial Sequence
  Description of Artificial Sequence: Synthetic oligonucleotide
cccacacgaggcugcggcg

SEQ ID NO: 1089 - RNA, 19 nt, Artificial Sequence
  Description of Artificial Sequence: Synthetic oligonucleotide
ccacacgaggcugcggcgu

SEQ ID NO: 1090 - RNA, 19 nt, Artificial Sequence
  Description of Artificial Sequence: Synthetic oligonucleotide
cacacgaggcugcggcguu

SEQ ID NO: 1091 - RNA, 19 nt, Artificial Sequence
  Description of Artificial Sequence: Synthetic oligonucleotide
acacgaggcugcggcguuc

SEQ ID NO: 1092 - RNA, 19 nt, Artificial Sequence
  Description of Artificial Sequence: Synthetic oligonucleotide
cacgaggcugcggcguucu

SEQ ID NO: 1093 - RNA, 19 nt, Artificial Sequence
  Description of Artificial Sequence: Synthetic oligonucleotide
acgaggcugcggcguucug

SEQ ID NO: 1094 - RNA, 19 nt, Artificial Sequence
  Description of Artificial Sequence: Synthetic oligonucleotide
cgaggcugcggcguucugg

SEQ ID NO: 1095 - RNA, 19 nt, Artificial Sequence
  Description of Artificial Sequence: Synthetic oligonucleotide
gaggcugcggcguucuggg

SEQ ID NO: 1096 - RNA, 19 nt, Artificial Sequence
  Description of Artificial Sequence: Synthetic oligonucleotide
aggcugcggcguucugggc

SEQ ID NO: 1097 - RNA, 19 nt, Artificial Sequence
  Description of Artificial Sequence: Synthetic oligonucleotide
ggcugcggcguucugggcg

SEQ ID NO: 1098 - RNA, 19 nt, Artificial Sequence
  Description of Artificial Sequence: Synthetic oligonucleotide
gcugcggcguucugggcgc

SEQ ID NO: 1099 - RNA, 19 nt, Artificial Sequence
  Description of Artificial Sequence: Synthetic oligonucleotide
cugcggcguucugggcgcu

SEQ ID NO: 1100 - RNA, 19 nt, Artificial Sequence
  Description of Artificial Sequence: Synthetic oligonucleotide
ugcggcguucugggcgcug

SEQ ID NO: 1101 - RNA, 19 nt, Artificial Sequence
  Description of Artificial Sequence: Synthetic oligonucleotide
gcggcguucugggcgcugu

SEQ ID NO: 1102 - RNA, 19 nt, Artificial Sequence
  Description of Artificial Sequence: Synthetic oligonucleotide
cggcguucugggcgcugug

SEQ ID NO: 1103 - RNA, 19 nt, Artificial Sequence
  Description of Artificial Sequence: Synthetic oligonucleotide
ggcguucugggcgcuguga

SEQ ID NO: 1104 - RNA, 19 nt, Artificial Sequence
  Description of Artificial Sequence: Synthetic oligonucleotide
gcguucugggcgcugugac

SEQ ID NO: 1105 - RNA, 19 nt, Artificial Sequence
  Description of Artificial Sequence: Synthetic oligonucleotide
cguucugggcgcugugacc

SEQ ID NO: 1106 - RNA, 19 nt, Artificial Sequence
  Description of Artificial Sequence: Synthetic oligonucleotide
guucugggcgcugugaccu

SEQ ID NO: 1107 - RNA, 19 nt, Artificial Sequence
  Description of Artificial Sequence: Synthetic oligonucleotide
uucugggcgcugugaccuc

SEQ ID NO: 1108 - RNA, 19 nt, Artificial Sequence
  Description of Artificial Sequence: Synthetic oligonucleotide
ucugggcgcugugaccucu

SEQ ID NO: 1109 - RNA, 19 nt, Artificial Sequence
  Description of Artificial Sequence: Synthetic oligonucleotide
cugggcgcugugaccucuu

SEQ ID NO: 1110 - RNA, 19 nt, Artificial Sequence
  Description of Artificial Sequence: Synthetic oligonucleotide
ugggcgcugugaccucuuc

SEQ ID NO: 1111 - RNA, 19 nt, Artificial Sequence
  Description of Artificial Sequence: Synthetic oligonucleotide
gggcgcugugaccucuucc

SEQ ID NO: 1112 - RNA, 19 nt, Artificial Sequence
  Description of Artificial Sequence: Synthetic oligonucleotide
ggcgcugugaccucuucca

SEQ ID NO: 1113 - RNA, 19 nt, Artificial Sequence
  Description of Artificial Sequence: Synthetic oligonucleotide
gcgcugugaccucuuccag

SEQ ID NO: 1114 - RNA, 19 nt, Artificial Sequence
  Description of Artificial Sequence: Synthetic oligonucleotide
cgcugugaccucuuccaga

SEQ ID NO: 1115 - RNA, 19 nt, Artificial Sequence
  Description of Artificial Sequence: Synthetic oligonucleotide
gcugugaccucuuccagaa

SEQ ID NO: 1116 - RNA, 19 nt, Artificial Sequence
  Description of Artificial Sequence: Synthetic oligonucleotide
cugugaccucuuccagaag

SEQ ID NO: 1117 - RNA, 19 nt, Artificial Sequence
  Description of Artificial Sequence: Synthetic oligonucleotide
ugugaccucuuccagaaga

SEQ ID NO: 1118 - RNA, 19 nt, Artificial Sequence
  Description of Artificial Sequence: Synthetic oligonucleotide
gugaccucuuccagaagaa

SEQ ID NO: 1119 - RNA, 19 nt, Artificial Sequence
  Description of Artificial Sequence: Synthetic oligonucleotide
ugaccucuuccagaagaaa

SEQ ID NO: 1120 - RNA, 19 nt, Artificial Sequence
  Description of Artificial Sequence: Synthetic oligonucleotide
gaccucuuccagaagaaag

SEQ ID NO: 1121 - RNA, 19 nt, Artificial Sequence
  Description of Artificial Sequence: Synthetic oligonucleotide
accucuuccagaagaaaga

SEQ ID NO: 1122 - RNA, 19 nt, Artificial Sequence
  Description of Artificial Sequence: Synthetic oligonucleotide
ccucuuccagaagaaagac

SEQ ID NO: 1123 - RNA, 19 nt, Artificial Sequence
  Description of Artificial Sequence: Synthetic oligonucleotide
cucuuccagaagaaagacu

SEQ ID NO: 1124 - RNA, 19 nt, Artificial Sequence
  Description of Artificial Sequence: Synthetic oligonucleotide
ucuuccagaagaaagacua

SEQ ID NO: 1125 - RNA, 19 nt, Artificial Sequence
  Description of Artificial Sequence: Synthetic oligonucleotide
cuuccagaagaaagacuac

SEQ ID NO: 1126 - RNA, 19 nt, Artificial Sequence
  Description of Artificial Sequence: Synthetic oligonucleotide
uuccagaagaaagacuacg

SEQ ID NO: 1127 - RNA, 19 nt, Artificial Sequence
  Description of Artificial Sequence: Synthetic oligonucleotide
uccagaagaaagacuacgu

SEQ ID NO: 1128 - RNA, 19 nt, Artificial Sequence
  Description of Artificial Sequence: Synthetic oligonucleotide
ccagaagaaagacuacgua

SEQ ID NO: 1129 - RNA, 19 nt, Artificial Sequence
  Description of Artificial Sequence: Synthetic oligonucleotide
cagaagaaagacuacguac

SEQ ID NO: 1130 - RNA, 19 nt, Artificial Sequence
  Description of Artificial Sequence: Synthetic oligonucleotide
agaagaaagacuacguacg

SEQ ID NO: 1131 - RNA, 19 nt, Artificial Sequence
  Description of Artificial Sequence: Synthetic oligonucleotide
gaagaaagacuacguacgg

SEQ ID NO: 1132 - RNA, 19 nt, Artificial Sequence
  Description of Artificial Sequence: Synthetic oligonucleotide
aagaaagacuacguacgga

SEQ ID NO: 1133 - RNA, 19 nt, Artificial Sequence
  Description of Artificial Sequence: Synthetic oligonucleotide
agaaagacuacguacggac

SEQ ID NO: 1134 - RNA, 19 nt, Artificial Sequence
  Description of Artificial Sequence: Synthetic oligonucleotide
gaaagacuacguacggacc

SEQ ID NO: 1135 - RNA, 19 nt, Artificial Sequence
  Description of Artificial Sequence: Synthetic oligonucleotide
aaagacuacguacggaccu

SEQ ID NO: 1136 - RNA, 19 nt, Artificial Sequence
  Description of Artificial Sequence: Synthetic oligonucleotide
aagacuacguacggaccug

SEQ ID NO: 1137 - RNA, 19 nt, Artificial Sequence
  Description of Artificial Sequence: Synthetic oligonucleotide
agacuacguacggaccugc

SEQ ID NO: 1138 - RNA, 19 nt, Artificial Sequence
  Description of Artificial Sequence: Synthetic oligonucleotide
gacuacguacggaccugca

SEQ ID NO: 1139 - RNA, 19 nt, Artificial Sequence
  Description of Artificial Sequence: Synthetic oligonucleotide
acuacguacggaccugcau

SEQ ID NO: 1140 - RNA, 19 nt, Artificial Sequence
  Description of Artificial Sequence: Synthetic oligonucleotide
cuacguacggaccugcauc

SEQ ID NO: 1141 - RNA, 19 nt, Artificial Sequence
  Description of Artificial Sequence: Synthetic oligonucleotide
uacguacggaccugcauca

SEQ ID NO: 1142 - RNA, 19 nt, Artificial Sequence
  Description of Artificial Sequence: Synthetic oligonucleotide
acguacggaccugcaucau

SEQ ID NO: 1143 - RNA, 19 nt, Artificial Sequence
  Description of Artificial Sequence: Synthetic oligonucleotide
cguacggaccugcaucaug

SEQ ID NO: 1144 - RNA, 19 nt, Artificial Sequence
  Description of Artificial Sequence: Synthetic oligonucleotide
guacggaccugcaucauga

SEQ ID NO: 1145 - RNA, 19 nt, Artificial Sequence
  Description of Artificial Sequence: Synthetic oligonucleotide
uacggaccugcaucaugaa

SEQ ID NO: 1146 - RNA, 19 nt, Artificial Sequence
  Description of Artificial Sequence: Synthetic oligonucleotide
acggaccugcaucaugaac

SEQ ID NO: 1147 - RNA, 19 nt, Artificial Sequence
  Description of Artificial Sequence: Synthetic oligonucleotide
cggaccugcaucaugaaca

SEQ ID NO: 1148 - RNA, 19 nt, Artificial Sequence
  Description of Artificial Sequence: Synthetic oligonucleotide
ggaccugcaucaugaacaa

SEQ ID NO: 1149 - RNA, 19 nt, Artificial Sequence
  Description of Artificial Sequence: Synthetic oligonucleotide
gaccugcaucaugaacaau

SEQ ID NO: 1150 - RNA, 19 nt, Artificial Sequence
  Description of Artificial Sequence: Synthetic oligonucleotide
accugcaucaugaacaaug

SEQ ID NO: 1151 - RNA, 19 nt, Artificial Sequence
  Description of Artificial Sequence: Synthetic oligonucleotide
ccugcaucaugaacaaugg

SEQ ID NO: 1152 - RNA, 19 nt, Artificial Sequence
  Description of Artificial Sequence: Synthetic oligonucleotide
cugcaucaugaacaauggg

SEQ ID NO: 1153 - RNA, 19 nt, Artificial Sequence
  Description of Artificial Sequence: Synthetic oligonucleotide
ugcaucaugaacaaugggg

SEQ ID NO: 1154 - RNA, 19 nt, Artificial Sequence
  Description of Artificial Sequence: Synthetic oligonucleotide
gcaucaugaacaauggggu

SEQ ID NO: 1155 - RNA, 19 nt, Artificial Sequence
  Description of Artificial Sequence: Synthetic oligonucleotide
caucaugaacaaugggguu

SEQ ID NO: 1156 - RNA, 19 nt, Artificial Sequence
  Description of Artificial Sequence: Synthetic oligonucleotide
aucaugaacaaugggguug

SEQ ID NO: 1157 - RNA, 19 nt, Artificial Sequence
  Description of Artificial Sequence: Synthetic oligonucleotide
ucaugaacaaugggguugg

SEQ ID NO: 1158 - RNA, 19 nt, Artificial Sequence
  Description of Artificial Sequence: Synthetic oligonucleotide
caugaacaaugggguuggg

SEQ ID NO: 1159 - RNA, 19 nt, Artificial Sequence
  Description of Artificial Sequence: Synthetic oligonucleotide
augaacaaugggguugggu

SEQ ID NO: 1160 - RNA, 19 nt, Artificial Sequence
  Description of Artificial Sequence: Synthetic oligonucleotide
ugaacaaugggguugggua

SEQ ID NO: 1161 - RNA, 19 nt, Artificial Sequence
  Description of Artificial Sequence: Synthetic oligonucleotide
gaacaaugggguuggguac

SEQ ID NO: 1162 - RNA, 19 nt, Artificial Sequence
  Description of Artificial Sequence: Synthetic oligonucleotide
aacaaugggguuggguacc

SEQ ID NO: 1163 - RNA, 19 nt, Artificial Sequence
  Description of Artificial Sequence: Synthetic oligonucleotide
acaaugggguuggguaccg

SEQ ID NO: 1164 - RNA, 19 nt, Artificial Sequence
  Description of Artificial Sequence: Synthetic oligonucleotide
caaugggguuggguaccgg

SEQ ID NO: 1165 - RNA, 19 nt, Artificial Sequence
  Description of Artificial Sequence: Synthetic oligonucleotide
aaugggguuggguaccggg

SEQ ID NO: 1166 - RNA, 19 nt, Artificial Sequence
  Description of Artificial Sequence: Synthetic oligonucleotide
augggguuggguaccgggg

SEQ ID NO: 1167 - RNA, 19 nt, Artificial Sequence
  Description of Artificial Sequence: Synthetic oligonucleotide
ugggguuggguaccggggc

SEQ ID NO: 1168 - RNA, 19 nt, Artificial Sequence
  Description of Artificial Sequence: Synthetic oligonucleotide
gggguuggguaccggggca

SEQ ID NO: 1169 - RNA, 19 nt, Artificial Sequence
  Description of Artificial Sequence: Synthetic oligonucleotide
ggguuggguaccggggcac

SEQ ID NO: 1170 - RNA, 19 nt, Artificial Sequence
  Description of Artificial Sequence: Synthetic oligonucleotide
gguuggguaccggggcacc

SEQ ID NO: 1171 - RNA, 19 nt, Artificial Sequence
  Description of Artificial Sequence: Synthetic oligonucleotide
guuggguaccggggcacca

SEQ ID NO: 1172 - RNA, 19 nt, Artificial Sequence
  Description of Artificial Sequence: Synthetic oligonucleotide
uuggguaccggggcaccau

SEQ ID NO: 1173 - RNA, 19 nt, Artificial Sequence
  Description of Artificial Sequence: Synthetic oligonucleotide
uggguaccggggcaccaug

SEQ ID NO: 1174 - RNA, 19 nt, Artificial Sequence
  Description of Artificial Sequence: Synthetic oligonucleotide
ggguaccggggcaccaugg

SEQ ID NO: 1175 - RNA, 19 nt, Artificial Sequence
  Description of Artificial Sequence: Synthetic oligonucleotide
gguaccggggcaccauggc

SEQ ID NO: 1176 - RNA, 19 nt, Artificial Sequence
  Description of Artificial Sequence: Synthetic oligonucleotide
guaccggggcaccauggcc

SEQ ID NO: 1177 - RNA, 19 nt, Artificial Sequence
  Description of Artificial Sequence: Synthetic oligonucleotide
uaccggggcaccauggcca

SEQ ID NO: 1178 - RNA, 19 nt, Artificial Sequence
  Description of Artificial Sequence: Synthetic oligonucleotide
accggggcaccauggccac

SEQ ID NO: 1179 - RNA, 19 nt, Artificial Sequence
  Description of Artificial Sequence: Synthetic oligonucleotide
ccggggcaccauggccacg

SEQ ID NO: 1180 - RNA, 19 nt, Artificial Sequence
  Description of Artificial Sequence: Synthetic oligonucleotide
cggggcaccauggccacga

SEQ ID NO: 1181 - RNA, 19 nt, Artificial Sequence
  Description of Artificial Sequence: Synthetic oligonucleotide
ggggcaccauggccacgac

SEQ ID NO: 1182 - RNA, 19 nt, Artificial Sequence
  Description of Artificial Sequence: Synthetic oligonucleotide
gggcaccauggccacgacc

SEQ ID NO: 1183 - RNA, 19 nt, Artificial Sequence
  Description of Artificial Sequence: Synthetic oligonucleotide
ggcaccauggccacgaccg

SEQ ID NO: 1184 - RNA, 19 nt, Artificial Sequence
  Description of Artificial Sequence: Synthetic oligonucleotide
gcaccauggccacgaccgu

SEQ ID NO: 1185 - RNA, 19 nt, Artificial Sequence
  Description of Artificial Sequence: Synthetic oligonucleotide
caccauggccacgaccgug

SEQ ID NO: 1186 - RNA, 19 nt, Artificial Sequence
  Description of Artificial Sequence: Synthetic oligonucleotide
accauggccacgaccgugg

SEQ ID NO: 1187 - RNA, 19 nt, Artificial Sequence
  Description of Artificial Sequence: Synthetic oligonucleotide
ccauggccacgaccguggg

SEQ ID NO: 1188 - RNA, 19 nt, Artificial Sequence
  Description of Artificial Sequence: Synthetic oligonucleotide
cauggccacgaccgugggu

SEQ ID NO: 1189 - RNA, 19 nt, Artificial Sequence
  Description of Artificial Sequence: Synthetic oligonucleotide
auggccacgaccgugggug

SEQ ID NO: 1190 - RNA, 19 nt, Artificial Sequence
  Description of Artificial Sequence: Synthetic oligonucleotide
uggccacgaccgugggugg

SEQ ID NO: 1191 - RNA, 19 nt, Artificial Sequence
  Description of Artificial Sequence: Synthetic oligonucleotide
ggccacgaccguggguggc

SEQ ID NO: 1192 - RNA, 19 nt, Artificial Sequence
  Description of Artificial Sequence: Synthetic oligonucleotide
gccacgaccguggguggcc

SEQ ID NO: 1193 - RNA, 19 nt, Artificial Sequence
  Description of Artificial Sequence: Synthetic oligonucleotide
ccacgaccguggguggccu

SEQ ID NO: 1194 - RNA, 19 nt, Artificial Sequence
  Description of Artificial Sequence: Synthetic oligonucleotide
cacgaccguggguggccug

SEQ ID NO: 1195 - RNA, 19 nt, Artificial Sequence
  Description of Artificial Sequence: Synthetic oligonucleotide
acgaccguggguggccugc

SEQ ID NO: 1196 - RNA, 19 nt, Artificial Sequence
  Description of Artificial Sequence: Synthetic oligonucleotide
cgaccguggguggccugcc

SEQ ID NO: 1197 - RNA, 19 nt, Artificial Sequence
  Description of Artificial Sequence: Synthetic oligonucleotide
gaccguggguggccugccc

SEQ ID NO: 1198 - RNA, 19 nt, Artificial Sequence
  Description of Artificial Sequence: Synthetic oligonucleotide
accguggguggccugcccu

SEQ ID NO: 1199 - RNA, 19 nt, Artificial Sequence
  Description of Artificial Sequence: Synthetic oligonucleotide
ccguggguggccugcccug

SEQ ID NO: 1200 - RNA, 19 nt, Artificial Sequence
  Description of Artificial Sequence: Synthetic oligonucleotide
cguggguggccugcccugc

SEQ ID NO: 1201 - RNA, 19 nt, Artificial Sequence
  Description of Artificial Sequence: Synthetic oligonucleotide
guggguggccugcccugcc

SEQ ID NO: 1202 - RNA, 19 nt, Artificial Sequence
  Description of Artificial Sequence: Synthetic oligonucleotide
uggguggccugcccugcca

SEQ ID NO: 1203 - RNA, 19 nt, Artificial Sequence
  Description of Artificial Sequence: Synthetic oligonucleotide
ggguggccugcccugccag

SEQ ID NO: 1204 - RNA, 19 nt, Artificial Sequence
  Description of Artificial Sequence: Synthetic oligonucleotide
gguggccugcccugccagg

SEQ ID NO: 1205 - RNA, 19 nt, Artificial Sequence
  Description of Artificial Sequence: Synthetic oligonucleotide
guggccugcccugccaggc

SEQ ID NO: 1206 - RNA, 19 nt, Artificial Sequence
  Description of Artificial Sequence: Synthetic oligonucleotide
uggccugcccugccaggcu

SEQ ID NO: 1207 - RNA, 19 nt, Artificial Sequence
  Description of Artificial Sequence: Synthetic oligonucleotide
ggccugcccugccaggcuu

SEQ ID NO: 1208 - RNA, 19 nt, Artificial Sequence
  Description of Artificial Sequence: Synthetic oligonucleotide
gccugcccugccaggcuug

SEQ ID NO: 1209 - RNA, 19 nt, Artificial Sequence
  Description of Artificial Sequence: Synthetic oligonucleotide
ccugcccugccaggcuugg

SEQ ID NO: 1210 - RNA, 19 nt, Artificial Sequence
  Description of Artificial Sequence: Synthetic oligonucleotide
cugcccugccaggcuugga

SEQ ID NO: 1211 - RNA, 19 nt, Artificial Sequence
  Description of Artificial Sequence: Synthetic oligonucleotide
ugcccugccaggcuuggag

SEQ ID NO: 1212 - RNA, 19 nt, Artificial Sequence
  Description of Artificial Sequence: Synthetic oligonucleotide
gcccugccaggcuuggagc

SEQ ID NO: 1213 - RNA, 19 nt, Artificial Sequence
  Description of Artificial Sequence: Synthetic oligonucleotide
cccugccaggcuuggagcc

SEQ ID NO: 1214 - RNA, 19 nt, Artificial Sequence
  Description of Artificial Sequence: Synthetic oligonucleotide
ccugccaggcuuggagcca

SEQ ID NO: 1215 - RNA, 19 nt, Artificial Sequence
  Description of Artificial Sequence: Synthetic oligonucleotide
cugccaggcuuggagccac

SEQ ID NO: 1216 - RNA, 19 nt, Artificial Sequence
  Description of Artificial Sequence: Synthetic oligonucleotide
ugccaggcuuggagccaca

SEQ ID NO: 1217 - RNA, 19 nt, Artificial Sequence
  Description of Artificial Sequence: Synthetic oligonucleotide
gccaggcuuggagccacaa

SEQ ID NO: 1218 - RNA, 19 nt, Artificial Sequence
  Description of Artificial Sequence: Synthetic oligonucleotide
ccaggcuuggagccacaag

SEQ ID NO: 1219 - RNA, 19 nt, Artificial Sequence
  Description of Artificial Sequence: Synthetic oligonucleotide
caggcuuggagccacaagu

SEQ ID NO: 1220 - RNA, 19 nt, Artificial Sequence
  Description of Artificial Sequence: Synthetic oligonucleotide
aggcuuggagccacaaguu

SEQ ID NO: 1221 - RNA, 19 nt, Artificial Sequence
  Description of Artificial Sequence: Synthetic oligonucleotide
ggcuuggagccacaaguuc

SEQ ID NO: 1222 - RNA, 19 nt, Artificial Sequence
  Description of Artificial Sequence: Synthetic oligonucleotide
gcuuggagccacaaguucc

SEQ ID NO: 1223 - RNA, 19 nt, Artificial Sequence
  Description of Artificial Sequence: Synthetic oligonucleotide
cuuggagccacaaguuccc

SEQ ID NO: 1224 - RNA, 19 nt, Artificial Sequence
  Description of Artificial Sequence: Synthetic oligonucleotide
uuggagccacaaguuccca

SEQ ID NO: 1225 - RNA, 19 nt, Artificial Sequence
  Description of Artificial Sequence: Synthetic oligonucleotide
uggagccacaaguucccaa

SEQ ID NO: 1226 - RNA, 19 nt, Artificial Sequence
  Description of Artificial Sequence: Synthetic oligonucleotide
ggagccacaaguucccaaa

SEQ ID NO: 1227 - RNA, 19 nt, Artificial Sequence
  Description of Artificial Sequence: Synthetic oligonucleotide
gagccacaaguucccaaau

SEQ ID NO: 1228 - RNA, 19 nt, Artificial Sequence
  Description of Artificial Sequence: Synthetic oligonucleotide
agccacaaguucccaaaug

SEQ ID NO: 1229 - RNA, 19 nt, Artificial Sequence
  Description of Artificial Sequence: Synthetic oligonucleotide
gccacaaguucccaaauga

SEQ ID NO: 1230 - RNA, 19 nt, Artificial Sequence
  Description of Artificial Sequence: Synthetic oligonucleotide
ccacaaguucccaaaugau

SEQ ID NO: 1231 - RNA, 19 nt, Artificial Sequence
  Description of Artificial Sequence: Synthetic oligonucleotide
cacaaguucccaaaugauc

SEQ ID NO: 1232 - RNA, 19 nt, Artificial Sequence
  Description of Artificial Sequence: Synthetic oligonucleotide
acaaguucccaaaugauca

SEQ ID NO: 1233 - RNA, 19 nt, Artificial Sequence
  Description of Artificial Sequence: Synthetic oligonucleotide
caaguucccaaaugaucac

SEQ ID NO: 1234 - RNA, 19 nt, Artificial Sequence
  Description of Artificial Sequence: Synthetic oligonucleotide
aaguucccaaaugaucaca

SEQ ID NO: 1235 - RNA, 19 nt, Artificial Sequence
  Description of Artificial Sequence: Synthetic oligonucleotide
aguucccaaaugaucacaa

SEQ ID NO: 1236 - RNA, 19 nt, Artificial Sequence
  Description of Artificial Sequence: Synthetic oligonucleotide
guucccaaaugaucacaag

SEQ ID NO: 1237 - RNA, 19 nt, Artificial Sequence
  Description of Artificial Sequence: Synthetic oligonucleotide
uucccaaaugaucacaagu

SEQ ID NO: 1238 - RNA, 19 nt, Artificial Sequence
  Description of Artificial Sequence: Synthetic oligonucleotide
ucccaaaugaucacaagua

SEQ ID NO: 1239 - RNA, 19 nt, Artificial Sequence
  Description of Artificial Sequence: Synthetic oligonucleotide
cccaaaugaucacaaguac

SEQ ID NO: 1240 - RNA, 19 nt, Artificial Sequence
  Description of Artificial Sequence: Synthetic oligonucleotide
ccaaaugaucacaaguaca

SEQ ID NO: 1241 - RNA, 19 nt, Artificial Sequence
  Description of Artificial Sequence: Synthetic oligonucleotide
caaaugaucacaaguacac

SEQ ID NO: 1242 - RNA, 19 nt, Artificial Sequence
  Description of Artificial Sequence: Synthetic oligonucleotide
aaaugaucacaaguacacg

SEQ ID NO: 1243 - RNA, 19 nt, Artificial Sequence
  Description of Artificial Sequence: Synthetic oligonucleotide
aaugaucacaaguacacgc

SEQ ID NO: 1244 - RNA, 19 nt, Artificial Sequence
  Description of Artificial Sequence: Synthetic oligonucleotide
augaucacaaguacacgcc

SEQ ID NO: 1245 - RNA, 19 nt, Artificial Sequence
  Description of Artificial Sequence: Synthetic oligonucleotide
ugaucacaaguacacgccc

SEQ ID NO: 1246 - RNA, 19 nt, Artificial Sequence
  Description of Artificial Sequence: Synthetic oligonucleotide
gaucacaaguacacgccca

SEQ ID NO: 1247 - RNA, 19 nt, Artificial Sequence
  Description of Artificial Sequence: Synthetic oligonucleotide
aucacaaguacacgcccac

SEQ ID NO: 1248 - RNA, 19 nt, Artificial Sequence
  Description of Artificial Sequence: Synthetic oligonucleotide
ucacaaguacacgcccacu

SEQ ID NO: 1249 - RNA, 19 nt, Artificial Sequence
  Description of Artificial Sequence: Synthetic oligonucleotide
cacaaguacacgcccacuc

SEQ ID NO: 1250 - RNA, 19 nt, Artificial Sequence
  Description of Artificial Sequence: Synthetic oligonucleotide
acaaguacacgcccacucu

SEQ ID NO: 1251 - RNA, 19 nt, Artificial Sequence
  Description of Artificial Sequence: Synthetic oligonucleotide
caaguacacgcccacucuc

SEQ ID NO: 1252 - RNA, 19 nt, Artificial Sequence
  Description of Artificial Sequence: Synthetic oligonucleotide
aaguacacgcccacucucc

SEQ ID NO: 1253 - RNA, 19 nt, Artificial Sequence
  Description of Artificial Sequence: Synthetic oligonucleotide
aguacacgcccacucuccg

SEQ ID NO: 1254 - RNA, 19 nt, Artificial Sequence
  Description of Artificial Sequence: Synthetic oligonucleotide
guacacgcccacucuccgg

SEQ ID NO: 1255 - RNA, 19 nt, Artificial Sequence
  Description of Artificial Sequence: Synthetic oligonucleotide
uacacgcccacucuccgga

SEQ ID NO: 1256 - RNA, 19 nt, Artificial Sequence
  Description of Artificial Sequence: Synthetic oligonucleotide
acacgcccacucuccggaa

SEQ ID NO: 1257 - RNA, 19 nt, Artificial Sequence
  Description of Artificial Sequence: Synthetic oligonucleotide
cacgcccacucuccggaau

SEQ ID NO: 1258 - RNA, 19 nt, Artificial Sequence
  Description of Artificial Sequence: Synthetic oligonucleotide
acgcccacucuccggaaug

SEQ ID NO: 1259 - RNA, 19 nt, Artificial Sequence
  Description of Artificial Sequence: Synthetic oligonucleotide
cgcccacucuccggaaugg

SEQ ID NO: 1260 - RNA, 19 nt, Artificial Sequence
  Description of Artificial Sequence: Synthetic oligonucleotide
gcccacucuccggaauggc

SEQ ID NO: 1261 - RNA, 19 nt, Artificial Sequence
  Description of Artificial Sequence: Synthetic oligonucleotide
cccacucuccggaauggcc

SEQ ID NO: 1262 - RNA, 19 nt, Artificial Sequence
  Description of Artificial Sequence: Synthetic oligonucleotide
ccacucuccggaauggccu

SEQ ID NO: 1263 - RNA, 19 nt, Artificial Sequence
  Description of Artificial Sequence: Synthetic oligonucleotide
cacucuccggaauggccug

SEQ ID NO: 1264 - RNA, 19 nt, Artificial Sequence
  Description of Artificial Sequence: Synthetic oligonucleotide
acucuccggaauggccugg

SEQ ID NO: 1265 - RNA, 19 nt, Artificial Sequence
  Description of Artificial Sequence: Synthetic oligonucleotide
cucuccggaauggccugga

SEQ ID NO: 1266 - RNA, 19 nt, Artificial Sequence
  Description of Artificial Sequence: Synthetic oligonucleotide
ucuccggaauggccuggaa

SEQ ID NO: 1267 - RNA, 19 nt, Artificial Sequence
  Description of Artificial Sequence: Synthetic oligonucleotide
cuccggaauggccuggaag

SEQ ID NO: 1268 - RNA, 19 nt, Artificial Sequence
  Description of Artificial Sequence: Synthetic oligonucleotide
uccggaauggccuggaaga

SEQ ID NO: 1269 - RNA, 19 nt, Artificial Sequence
  Description of Artificial Sequence: Synthetic oligonucleotide
ccggaauggccuggaagag

SEQ ID NO: 1270 - RNA, 19 nt, Artificial Sequence
  Description of Artificial Sequence: Synthetic oligonucleotide
cggaauggccuggaagaga

SEQ ID NO: 1271 - RNA, 19 nt, Artificial Sequence
  Description of Artificial Sequence: Synthetic oligonucleotide
ggaauggccuggaagagaa

SEQ ID NO: 1272 - RNA, 19 nt, Artificial Sequence
  Description of Artificial Sequence: Synthetic oligonucleotide
gaauggccuggaagagaac

SEQ ID NO: 1273 - RNA, 19 nt, Artificial Sequence
  Description of Artificial Sequence: Synthetic oligonucleotide
aauggccuggaagagaacu

SEQ ID NO: 1274 - RNA, 19 nt, Artificial Sequence
  Description of Artificial Sequence: Synthetic oligonucleotide
auggccuggaagagaacuu

SEQ ID NO: 1275 - RNA, 19 nt, Artificial Sequence
  Description of Artificial Sequence: Synthetic oligonucleotide
uggccuggaagagaacuuc

SEQ ID NO: 1276 - RNA, 19 nt, Artificial Sequence
  Description of Artificial Sequence: Synthetic oligonucleotide
ggccuggaagagaacuucu

SEQ ID NO: 1277 - RNA, 19 nt, Artificial Sequence
  Description of Artificial Sequence: Synthetic oligonucleotide
gccuggaagagaacuucug

SEQ ID NO: 1278 - RNA, 19 nt, Artificial Sequence
  Description of Artificial Sequence: Synthetic oligonucleotide
ccuggaagagaacuucugc

SEQ ID NO: 1279 - RNA, 19 nt, Artificial Sequence
  Description of Artificial Sequence: Synthetic oligonucleotide
cuggaagagaacuucugcc

SEQ ID NO: 1280 - RNA, 19 nt, Artificial Sequence
  Description of Artificial Sequence: Synthetic oligonucleotide
uggaagagaacuucugccg

SEQ ID NO: 1281 - RNA, 19 nt, Artificial Sequence
  Description of Artificial Sequence: Synthetic oligonucleotide
ggaagagaacuucugccgu

SEQ ID NO: 1282 - RNA, 19 nt, Artificial Sequence
  Description of Artificial Sequence: Synthetic oligonucleotide
gaagagaacuucugccgua

SEQ ID NO: 1283 - RNA, 19 nt, Artificial Sequence
  Description of Artificial Sequence: Synthetic oligonucleotide
aagagaacuucugccguaa

SEQ ID NO: 1284 - RNA, 19 nt, Artificial Sequence
  Description of Artificial Sequence: Synthetic oligonucleotide
agagaacuucugccguaac

SEQ ID NO: 1285 - RNA, 19 nt, Artificial Sequence
  Description of Artificial Sequence: Synthetic oligonucleotide
gagaacuucugccguaacc

SEQ ID NO: 1286 - RNA, 19 nt, Artificial Sequence
  Description of Artificial Sequence: Synthetic oligonucleotide
agaacuucugccguaaccc

SEQ ID NO: 1287 - RNA, 19 nt, Artificial Sequence
  Description of Artificial Sequence: Synthetic oligonucleotide
gaacuucugccguaacccu

SEQ ID NO: 1288 - RNA, 19 nt, Artificial Sequence
  Description of Artificial Sequence: Synthetic oligonucleotide
aacuucugccguaacccug

SEQ ID NO: 1289 - RNA, 19 nt, Artificial Sequence
  Description of Artificial Sequence: Synthetic oligonucleotide
acuucugccguaacccuga

SEQ ID NO: 1290 - RNA, 19 nt, Artificial Sequence
  Description of Artificial Sequence: Synthetic oligonucleotide
cuucugccguaacccugau

SEQ ID NO: 1291 - RNA, 19 nt, Artificial Sequence
  Description of Artificial Sequence: Synthetic oligonucleotide
uucugccguaacccugaug

SEQ ID NO: 1292 - RNA, 19 nt, Artificial Sequence
  Description of Artificial Sequence: Synthetic oligonucleotide
ucugccguaacccugaugg

SEQ ID NO: 1293 - RNA, 19 nt, Artificial Sequence
  Description of Artificial Sequence: Synthetic oligonucleotide
cugccguaacccugauggc

SEQ ID NO: 1294 - RNA, 19 nt, Artificial Sequence
  Description of Artificial Sequence: Synthetic oligonucleotide
ugccguaacccugauggcg

SEQ ID NO: 1295 - RNA, 19 nt, Artificial Sequence
  Description of Artificial Sequence: Synthetic oligonucleotide
gccguaacccugauggcga

SEQ ID NO: 1296 - RNA, 19 nt, Artificial Sequence
  Description of Artificial Sequence: Synthetic oligonucleotide
ccguaacccugauggcgac

SEQ ID NO: 1297 - RNA, 19 nt, Artificial Sequence
  Description of Artificial Sequence: Synthetic oligonucleotide
cguaacccugauggcgacc

SEQ ID NO: 1298 - RNA, 19 nt, Artificial Sequence
  Description of Artificial Sequence: Synthetic oligonucleotide
guaacccugauggcgaccc

SEQ ID NO: 1299 - RNA, 19 nt, Artificial Sequence
  Description of Artificial Sequence: Synthetic oligonucleotide
uaacccugauggcgacccc

SEQ ID NO: 1300 - RNA, 19 nt, Artificial Sequence
  Description of Artificial Sequence: Synthetic oligonucleotide
aacccugauggcgaccccg

SEQ ID NO: 1301 - RNA, 19 nt, Artificial Sequence
  Description of Artificial Sequence: Synthetic oligonucleotide
acccugauggcgaccccgg

SEQ ID NO: 1302 - RNA, 19 nt, Artificial Sequence
  Description of Artificial Sequence: Synthetic oligonucleotide
cccugauggcgaccccgga

SEQ ID NO: 1303 - RNA, 19 nt, Artificial Sequence
  Description of Artificial Sequence: Synthetic oligonucleotide
ccugauggcgaccccggag

SEQ ID NO: 1304 - RNA, 19 nt, Artificial Sequence
  Description of Artificial Sequence: Synthetic oligonucleotide
cugauggcgaccccggagg

SEQ ID NO: 1305 - RNA, 19 nt, Artificial Sequence
  Description of Artificial Sequence: Synthetic oligonucleotide
ugauggcgaccccggaggu

SEQ ID NO: 1306 - RNA, 19 nt, Artificial Sequence
  Description of Artificial Sequence: Synthetic oligonucleotide
gauggcgaccccggagguc

SEQ ID NO: 1307 - RNA, 19 nt, Artificial Sequence
  Description of Artificial Sequence: Synthetic oligonucleotide
auggcgaccccggaggucc

SEQ ID NO: 1308 - RNA, 19 nt, Artificial Sequence
  Description of Artificial Sequence: Synthetic oligonucleotide
uggcgaccccggagguccu

SEQ ID NO: 1309 - RNA, 19 nt, Artificial Sequence
  Description of Artificial Sequence: Synthetic oligonucleotide
ggcgaccccggagguccuu

SEQ ID NO: 1310 - RNA, 19 nt, Artificial Sequence
  Description of Artificial Sequence: Synthetic oligonucleotide
gcgaccccggagguccuug

SEQ ID NO: 1311 - RNA, 19 nt, Artificial Sequence
  Description of Artificial Sequence: Synthetic oligonucleotide
cgaccccggagguccuugg

SEQ ID NO: 1312 - RNA, 19 nt, Artificial Sequence
  Description of Artificial Sequence: Synthetic oligonucleotide
gaccccggagguccuuggu

SEQ ID NO: 1313 - RNA, 19 nt, Artificial Sequence
  Description of Artificial Sequence: Synthetic oligonucleotide
accccggagguccuuggug

SEQ ID NO: 1314 - RNA, 19 nt, Artificial Sequence
  Description of Artificial Sequence: Synthetic oligonucleotide
ccccggagguccuuggugc

SEQ ID NO: 1315 - RNA, 19 nt, Artificial Sequence
  Description of Artificial Sequence: Synthetic oligonucleotide
cccggagguccuuggugcu

SEQ ID NO: 1316 - RNA, 19 nt, Artificial Sequence
  Description of Artificial Sequence: Synthetic oligonucleotide
ccggagguccuuggugcua

SEQ ID NO: 1317 - RNA, 19 nt, Artificial Sequence
  Description of Artificial Sequence: Synthetic oligonucleotide
cggagguccuuggugcuac

SEQ ID NO: 1318 - RNA, 19 nt, Artificial Sequence
  Description of Artificial Sequence: Synthetic oligonucleotide
ggagguccuuggugcuaca

SEQ ID NO: 1319 - RNA, 19 nt, Artificial Sequence
  Description of Artificial Sequence: Synthetic oligonucleotide
gagguccuuggugcuacac

SEQ ID NO: 1320 - RNA, 19 nt, Artificial Sequence
  Description of Artificial Sequence: Synthetic oligonucleotide
agguccuuggugcuacaca

SEQ ID NO: 1321 - RNA, 19 nt, Artificial Sequence
  Description of Artificial Sequence: Synthetic oligonucleotide
gguccuuggugcuacacaa

SEQ ID NO: 1322 - RNA, 19 nt, Artificial Sequence
  Description of Artificial Sequence: Synthetic oligonucleotide
guccuuggugcuacacaac

SEQ ID NO: 1323 - RNA, 19 nt, Artificial Sequence
  Description of Artificial Sequence: Synthetic oligonucleotide
uccuuggugcuacacaaca

SEQ ID NO: 1324 - RNA, 19 nt, Artificial Sequence
  Description of Artificial Sequence: Synthetic oligonucleotide
ccuuggugcuacacaacag

SEQ ID NO: 1325 - RNA, 19 nt, Artificial Sequence
  Description of Artificial Sequence: Synthetic oligonucleotide
cuuggugcuacacaacaga

SEQ ID NO: 1326 - RNA, 19 nt, Artificial Sequence
  Description of Artificial Sequence: Synthetic oligonucleotide
uuggugcuacacaacagac

SEQ ID NO: 1327 - RNA, 19 nt, Artificial Sequence
  Description of Artificial Sequence: Synthetic oligonucleotide
uggugcuacacaacagacc

SEQ ID NO: 1328 - RNA, 19 nt, Artificial Sequence
  Description of Artificial Sequence: Synthetic oligonucleotide
ggugcuacacaacagaccc

SEQ ID NO: 1329 - RNA, 19 nt, Artificial Sequence
  Description of Artificial Sequence: Synthetic oligonucleotide
gugcuacacaacagacccu

SEQ ID NO: 1330 - RNA, 19 nt, Artificial Sequence
  Description of Artificial Sequence: Synthetic oligonucleotide
ugcuacacaacagacccug

SEQ ID NO: 1331 - RNA, 19 nt, Artificial Sequence
  Description of Artificial Sequence: Synthetic oligonucleotide
gcuacacaacagacccugc

SEQ ID NO: 1332 - RNA, 19 nt, Artificial Sequence
  Description of Artificial Sequence: Synthetic oligonucleotide
cuacacaacagacccugcu

SEQ ID NO: 1333 - RNA, 19 nt, Artificial Sequence
  Description of Artificial Sequence: Synthetic oligonucleotide
uacacaacagacccugcug

SEQ ID NO: 1334 - RNA, 19 nt, Artificial Sequence
  Description of Artificial Sequence: Synthetic oligonucleotide
acacaacagacccugcugu

SEQ ID NO: 1335 - RNA, 19 nt, Artificial Sequence
  Description of Artificial Sequence: Synthetic oligonucleotide
cacaacagacccugcugug

SEQ ID NO: 1336 - RNA, 19 nt, Artificial Sequence
  Description of Artificial Sequence: Synthetic oligonucleotide
acaacagacccugcugugc

SEQ ID NO: 1337 - RNA, 19 nt, Artificial Sequence
  Description of Artificial Sequence: Synthetic oligonucleotide
caacagacccugcugugcg

SEQ ID NO: 1338 - RNA, 19 nt, Artificial Sequence
  Description of Artificial Sequence: Synthetic oligonucleotide
aacagacccugcugugcgc

SEQ ID NO: 1339 - RNA, 19 nt, Artificial Sequence
  Description of Artificial Sequence: Synthetic oligonucleotide
acagacccugcugugcgcu

SEQ ID NO: 1340 - RNA, 19 nt, Artificial Sequence
  Description of Artificial Sequence: Synthetic oligonucleotide
cagacccugcugugcgcuu

SEQ ID NO: 1341 - RNA, 19 nt, Artificial Sequence
  Description of Artificial Sequence: Synthetic oligonucleotide
agacccugcugugcgcuuc

SEQ ID NO: 1342 - RNA, 19 nt, Artificial Sequence
  Description of Artificial Sequence: Synthetic oligonucleotide
gacccugcugugcgcuucc

SEQ ID NO: 1343 - RNA, 19 nt, Artificial Sequence
  Description of Artificial Sequence: Synthetic oligonucleotide
acccugcugugcgcuucca

SEQ ID NO: 1344 - RNA, 19 nt, Artificial Sequence
  Description of Artificial Sequence: Synthetic oligonucleotide
cccugcugugcgcuuccag

SEQ ID NO: 1345 - RNA, 19 nt, Artificial Sequence
  Description of Artificial Sequence: Synthetic oligonucleotide
ccugcugugcgcuuccaga

SEQ ID NO: 1346 - RNA, 19 nt, Artificial Sequence
  Description of Artificial Sequence: Synthetic oligonucleotide
cugcugugcgcuuccagag

SEQ ID NO: 1347 - RNA, 19 nt, Artificial Sequence
  Description of Artificial Sequence: Synthetic oligonucleotide
ugcugugcgcuuccagagc

SEQ ID NO: 1348 - RNA, 19 nt, Artificial Sequence
  Description of Artificial Sequence: Synthetic oligonucleotide
gcugugcgcuuccagagcu

SEQ ID NO: 1349 - RNA, 19 nt, Artificial Sequence
  Description of Artificial Sequence: Synthetic oligonucleotide
cugugcgcuuccagagcug

SEQ ID NO: 1350 - RNA, 19 nt, Artificial Sequence
  Description of Artificial Sequence: Synthetic oligonucleotide
ugugcgcuuccagagcugc

SEQ ID NO: 1351 - RNA, 19 nt, Artificial Sequence
  Description of Artificial Sequence: Synthetic oligonucleotide
gugcgcuuccagagcugcg

SEQ ID NO: 1352 - RNA, 19 nt, Artificial Sequence
  Description of Artificial Sequence: Synthetic oligonucleotide
ugcgcuuccagagcugcgg

SEQ ID NO: 1353 - RNA, 19 nt, Artificial Sequence
  Description of Artificial Sequence: Synthetic oligonucleotide
gcgcuuccagagcugcggc

SEQ ID NO: 1354 - RNA, 19 nt, Artificial Sequence
  Description of Artificial Sequence: Synthetic oligonucleotide
cgcuuccagagcugcggca

SEQ ID NO: 1355 - RNA, 19 nt, Artificial Sequence
  Description of Artificial Sequence: Synthetic oligonucleotide
gcuuccagagcugcggcau

SEQ ID NO: 1356 - RNA, 19 nt, Artificial Sequence
  Description of Artificial Sequence: Synthetic oligonucleotide
cuuccagagcugcggcauc

SEQ ID NO: 1357 - RNA, 19 nt, Artificial Sequence
  Description of Artificial Sequence: Synthetic oligonucleotide
uuccagagcugcggcauca

SEQ ID NO: 1358 - RNA, 19 nt, Artificial Sequence
  Description of Artificial Sequence: Synthetic oligonucleotide
uccagagcugcggcaucaa

SEQ ID NO: 1359 - RNA, 19 nt, Artificial Sequence
  Description of Artificial Sequence: Synthetic oligonucleotide
ccagagcugcggcaucaaa

SEQ ID NO: 1360 - RNA, 19 nt, Artificial Sequence
  Description of Artificial Sequence: Synthetic oligonucleotide
cagagcugcggcaucaaau

SEQ ID NO: 1361 - RNA, 19 nt, Artificial Sequence
  Description of Artificial Sequence: Synthetic oligonucleotide
agagcugcggcaucaaauc

SEQ ID NO: 1362 - RNA, 19 nt, Artificial Sequence
  Description of Artificial Sequence: Synthetic oligonucleotide
gagcugcggcaucaaaucc

SEQ ID NO: 1363 - RNA, 19 nt, Artificial Sequence
  Description of Artificial Sequence: Synthetic oligonucleotide
agcugcggcaucaaauccu

SEQ ID NO: 1364 - RNA, 19 nt, Artificial Sequence
  Description of Artificial Sequence: Synthetic oligonucleotide
gcugcggcaucaaauccug

SEQ ID NO: 1365 - RNA, 19 nt, Artificial Sequence
  Description of Artificial Sequence: Synthetic oligonucleotide
cugcggcaucaaauccugc

SEQ ID NO: 1366 - RNA, 19 nt, Artificial Sequence
  Description of Artificial Sequence: Synthetic oligonucleotide
ugcggcaucaaauccugcc

SEQ ID NO: 1367 - RNA, 19 nt, Artificial Sequence
  Description of Artificial Sequence: Synthetic oligonucleotide
gcggcaucaaauccugccg

SEQ ID NO: 1368 - RNA, 19 nt, Artificial Sequence
  Description of Artificial Sequence: Synthetic oligonucleotide
cggcaucaaauccugccgg

SEQ ID NO: 1369 - RNA, 19 nt, Artificial Sequence
  Description of Artificial Sequence: Synthetic oligonucleotide
ggcaucaaauccugccggg

SEQ ID NO: 1370 - RNA, 19 nt, Artificial Sequence
  Description of Artificial Sequence: Synthetic oligonucleotide
gcaucaaauccugccggga

SEQ ID NO: 1371 - RNA, 19 nt, Artificial Sequence
  Description of Artificial Sequence: Synthetic oligonucleotide
caucaaauccugccgggag

SEQ ID NO: 1372 - RNA, 19 nt, Artificial Sequence
  Description of Artificial Sequence: Synthetic oligonucleotide
aucaaauccugccgggagg

SEQ ID NO: 1373 - RNA, 19 nt, Artificial Sequence
  Description of Artificial Sequence: Synthetic oligonucleotide
ucaaauccugccgggaggc

SEQ ID NO: 1374 - RNA, 19 nt, Artificial Sequence
  Description of Artificial Sequence: Synthetic oligonucleotide
caaauccugccgggaggcc

SEQ ID NO: 1375 - RNA, 19 nt, Artificial Sequence
  Description of Artificial Sequence: Synthetic oligonucleotide
aaauccugccgggaggccg

SEQ ID NO: 1376 - RNA, 19 nt, Artificial Sequence
  Description of Artificial Sequence: Synthetic oligonucleotide
aauccugccgggaggccgc

SEQ ID NO: 1377 - RNA, 19 nt, Artificial Sequence
  Description of Artificial Sequence: Synthetic oligonucleotide
auccugccgggaggccgcg

SEQ ID NO: 1378 - RNA, 19 nt, Artificial Sequence
  Description of Artificial Sequence: Synthetic oligonucleotide
uccugccgggaggccgcgu

SEQ ID NO: 1379 - RNA, 19 nt, Artificial Sequence
  Description of Artificial Sequence: Synthetic oligonucleotide
ccugccgggaggccgcgug

SEQ ID NO: 1380 - RNA, 19 nt, Artificial Sequence
  Description of Artificial Sequence: Synthetic oligonucleotide
cugccgggaggccgcgugu

SEQ ID NO: 1381 - RNA, 19 nt, Artificial Sequence
  Description of Artificial Sequence: Synthetic oligonucleotide
ugccgggaggccgcgugug

SEQ ID NO: 1382 - RNA, 19 nt, Artificial Sequence
  Description of Artificial Sequence: Synthetic oligonucleotide
gccgggaggccgcgugugu

SEQ ID NO: 1383 - RNA, 19 nt, Artificial Sequence
  Description of Artificial Sequence: Synthetic oligonucleotide
ccgggaggccgcguguguc

SEQ ID NO: 1384 - RNA, 19 nt, Artificial Sequence
  Description of Artificial Sequence: Synthetic oligonucleotide
cgggaggccgcgugugucu

SEQ ID NO: 1385 - RNA, 19 nt, Artificial Sequence
  Description of Artificial Sequence: Synthetic oligonucleotide
gggaggccgcgugugucug

SEQ ID NO: 1386 - RNA, 19 nt, Artificial Sequence
  Description of Artificial Sequence: Synthetic oligonucleotide
ggaggccgcgugugucugg

SEQ ID NO: 1387 - RNA, 19 nt, Artificial Sequence
  Description of Artificial Sequence: Synthetic oligonucleotide
gaggccgcgugugucuggu

SEQ ID NO: 1388 - RNA, 19 nt, Artificial Sequence
  Description of Artificial Sequence: Synthetic oligonucleotide
aggccgcgugugucuggug

SEQ ID NO: 1389 - RNA, 19 nt, Artificial Sequence
  Description of Artificial Sequence: Synthetic oligonucleotide
ggccgcgugugucuggugc

SEQ ID NO: 1390 - RNA, 19 nt, Artificial Sequence
  Description of Artificial Sequence: Synthetic oligonucleotide
gccgcgugugucuggugca

SEQ ID NO: 1391 - RNA, 19 nt, Artificial Sequence
  Description of Artificial Sequence: Synthetic oligonucleotide
ccgcgugugucuggugcaa

SEQ ID NO: 1392 - RNA, 19 nt, Artificial Sequence
  Description of Artificial Sequence: Synthetic oligonucleotide
cgcgugugucuggugcaau

SEQ ID NO: 1393 - RNA, 19 nt, Artificial Sequence
  Description of Artificial Sequence: Synthetic oligonucleotide
gcgugugucuggugcaaug

SEQ ID NO: 1394 - RNA, 19 nt, Artificial Sequence
  Description of Artificial Sequence: Synthetic oligonucleotide
cgugugucuggugcaaugg

SEQ ID NO: 1395 - RNA, 19 nt, Artificial Sequence
  Description of Artificial Sequence: Synthetic oligonucleotide
gugugucuggugcaauggc

SEQ ID NO: 1396 - RNA, 19 nt, Artificial Sequence
  Description of Artificial Sequence: Synthetic oligonucleotide
ugugucuggugcaauggcg

SEQ ID NO: 1397 - RNA, 19 nt, Artificial Sequence
  Description of Artificial Sequence: Synthetic oligonucleotide
gugucuggugcaauggcga

SEQ ID NO: 1398 - RNA, 19 nt, Artificial Sequence
  Description of Artificial Sequence: Synthetic oligonucleotide
ugucuggugcaauggcgag

SEQ ID NO: 1399 - RNA, 19 nt, Artificial Sequence
  Description of Artificial Sequence: Synthetic oligonucleotide
gucuggugcaauggcgagg

SEQ ID NO: 1400 - RNA, 19 nt, Artificial Sequence
  Description of Artificial Sequence: Synthetic oligonucleotide
ucuggugcaauggcgagga

SEQ ID NO: 1401 - RNA, 19 nt, Artificial Sequence
  Description of Artificial Sequence: Synthetic oligonucleotide
cuggugcaauggcgaggaa

SEQ ID NO: 1402 - RNA, 19 nt, Artificial Sequence
  Description of Artificial Sequence: Synthetic oligonucleotide
uggugcaauggcgaggaau

SEQ ID NO: 1403 - RNA, 19 nt, Artificial Sequence
  Description of Artificial Sequence: Synthetic oligonucleotide
ggugcaauggcgaggaaua

SEQ ID NO: 1404 - RNA, 19 nt, Artificial Sequence
  Description of Artificial Sequence: Synthetic oligonucleotide
gugcaauggcgaggaauac

SEQ ID NO: 1405 - RNA, 19 nt, Artificial Sequence
  Description of Artificial Sequence: Synthetic oligonucleotide
ugcaauggcgaggaauacc

SEQ ID NO: 1406 - RNA, 19 nt, Artificial Sequence
  Description of Artificial Sequence: Synthetic oligonucleotide
gcaauggcgaggaauaccg

SEQ ID NO: 1407 - RNA, 19 nt, Artificial Sequence
  Description of Artificial Sequence: Synthetic oligonucleotide
caauggcgaggaauaccgc

SEQ ID NO: 1408 - RNA, 19 nt, Artificial Sequence
  Description of Artificial Sequence: Synthetic oligonucleotide
aauggcgaggaauaccgcg

SEQ ID NO: 1409 - RNA, 19 nt, Artificial Sequence
  Description of Artificial Sequence: Synthetic oligonucleotide
auggcgaggaauaccgcgg

SEQ ID NO: 1410 - RNA, 19 nt, Artificial Sequence
  Description of Artificial Sequence: Synthetic oligonucleotide
uggcgaggaauaccgcggc

SEQ ID NO: 1411 - RNA, 19 nt, Artificial Sequence
  Description of Artificial Sequence: Synthetic oligonucleotide
ggcgaggaauaccgcggcg

SEQ ID NO: 1412 - RNA, 19 nt, Artificial Sequence
  Description of Artificial Sequence: Synthetic oligonucleotide
gcgaggaauaccgcggcgc

SEQ ID NO: 1413 - RNA, 19 nt, Artificial Sequence
  Description of Artificial Sequence: Synthetic oligonucleotide
cgaggaauaccgcggcgcg

SEQ ID NO: 1414 - RNA, 19 nt, Artificial Sequence
  Description of Artificial Sequence: Synthetic oligonucleotide
gaggaauaccgcggcgcgg

SEQ ID NO: 1415 - RNA, 19 nt, Artificial Sequence
  Description of Artificial Sequence: Synthetic oligonucleotide
aggaauaccgcggcgcggu

SEQ ID NO: 1416 - RNA, 19 nt, Artificial Sequence
  Description of Artificial Sequence: Synthetic oligonucleotide
ggaauaccgcggcgcggua

SEQ ID NO: 1417 - RNA, 19 nt, Artificial Sequence
  Description of Artificial Sequence: Synthetic oligonucleotide
gaauaccgcggcgcgguag

SEQ ID NO: 1418 - RNA, 19 nt, Artificial Sequence
  Description of Artificial Sequence: Synthetic oligonucleotide
aauaccgcggcgcgguaga

SEQ ID NO: 1419 - RNA, 19 nt, Artificial Sequence
  Description of Artificial Sequence: Synthetic oligonucleotide
auaccgcggcgcgguagac

SEQ ID NO: 1420 - RNA, 19 nt, Artificial Sequence
  Description of Artificial Sequence: Synthetic oligonucleotide
uaccgcggcgcgguagacc

SEQ ID NO: 1421 - RNA, 19 nt, Artificial Sequence
  Description of Artificial Sequence: Synthetic oligonucleotide
accgcggcgcgguagaccg

SEQ ID NO: 1422 - RNA, 19 nt, Artificial Sequence
  Description of Artificial Sequence: Synthetic oligonucleotide
ccgcggcgcgguagaccgc

SEQ ID NO: 1423 - RNA, 19 nt, Artificial Sequence
  Description of Artificial Sequence: Synthetic oligonucleotide
cgcggcgcgguagaccgca

SEQ ID NO: 1424 - RNA, 19 nt, Artificial Sequence
  Description of Artificial Sequence: Synthetic oligonucleotide
gcggcgcgguagaccgcac

SEQ ID NO: 1425 - RNA, 19 nt, Artificial Sequence
  Description of Artificial Sequence: Synthetic oligonucleotide
cggcgcgguagaccgcacg

SEQ ID NO: 1426 - RNA, 19 nt, Artificial Sequence
  Description of Artificial Sequence: Synthetic oligonucleotide
ggcgcgguagaccgcacgg

SEQ ID NO: 1427 - RNA, 19 nt, Artificial Sequence
  Description of Artificial Sequence: Synthetic oligonucleotide
gcgcgguagaccgcacgga

SEQ ID NO: 1428 - RNA, 19 nt, Artificial Sequence
  Description of Artificial Sequence: Synthetic oligonucleotide
cgcgguagaccgcacggag

SEQ ID NO: 1429 - RNA, 19 nt, Artificial Sequence
  Description of Artificial Sequence: Synthetic oligonucleotide
gcgguagaccgcacggagu

SEQ ID NO: 1430 - RNA, 19 nt, Artificial Sequence
  Description of Artificial Sequence: Synthetic oligonucleotide
cgguagaccgcacggaguc

SEQ ID NO: 1431 - RNA, 19 nt, Artificial Sequence
  Description of Artificial Sequence: Synthetic oligonucleotide
gguagaccgcacggaguca

SEQ ID NO: 1432 - RNA, 19 nt, Artificial Sequence
  Description of Artificial Sequence: Synthetic oligonucleotide
guagaccgcacggagucag

SEQ ID NO: 1433 - RNA, 19 nt, Artificial Sequence
  Description of Artificial Sequence: Synthetic oligonucleotide
uagaccgcacggagucagg

SEQ ID NO: 1434 - RNA, 19 nt, Artificial Sequence
  Description of Artificial Sequence: Synthetic oligonucleotide
agaccgcacggagucaggg

SEQ ID NO: 1435 - RNA, 19 nt, Artificial Sequence
  Description of Artificial Sequence: Synthetic oligonucleotide
gaccgcacggagucagggc

SEQ ID NO: 1436 - RNA, 19 nt, Artificial Sequence
  Description of Artificial Sequence: Synthetic oligonucleotide
accgcacggagucagggcg

SEQ ID NO: 1437 - RNA, 19 nt, Artificial Sequence
  Description of Artificial Sequence: Synthetic oligonucleotide
ccgcacggagucagggcgc

SEQ ID NO: 1438 - RNA, 19 nt, Artificial Sequence
  Description of Artificial Sequence: Synthetic oligonucleotide
cgcacggagucagggcgcg

SEQ ID NO: 1439 - RNA, 19 nt, Artificial Sequence
  Description of Artificial Sequence: Synthetic oligonucleotide
gcacggagucagggcgcga

SEQ ID NO: 1440 - RNA, 19 nt, Artificial Sequence
  Description of Artificial Sequence: Synthetic oligonucleotide
cacggagucagggcgcgag

SEQ ID NO: 1441 - RNA, 19 nt, Artificial Sequence
  Description of Artificial Sequence: Synthetic oligonucleotide
acggagucagggcgcgagu

SEQ ID NO: 1442 - RNA, 19 nt, Artificial Sequence
  Description of Artificial Sequence: Synthetic oligonucleotide
cggagucagggcgcgagug

SEQ ID NO: 1443 - RNA, 19 nt, Artificial Sequence
  Description of Artificial Sequence: Synthetic oligonucleotide
ggagucagggcgcgagugc

SEQ ID NO: 1444 - RNA, 19 nt, Artificial Sequence
  Description of Artificial Sequence: Synthetic oligonucleotide
gagucagggcgcgagugcc

SEQ ID NO: 1445 - RNA, 19 nt, Artificial Sequence
  Description of Artificial Sequence: Synthetic oligonucleotide
agucagggcgcgagugcca

SEQ ID NO: 1446 - RNA, 19 nt, Artificial Sequence
  Description of Artificial Sequence: Synthetic oligonucleotide
gucagggcgcgagugccag

SEQ ID NO: 1447 - RNA, 19 nt, Artificial Sequence
  Description of Artificial Sequence: Synthetic oligonucleotide
ucagggcgcgagugccagc

SEQ ID NO: 1448 - RNA, 19 nt, Artificial Sequence
  Description of Artificial Sequence: Synthetic oligonucleotide
cagggcgcgagugccagcg

SEQ ID NO: 1449 - RNA, 19 nt, Artificial Sequence
  Description of Artificial Sequence: Synthetic oligonucleotide
agggcgcgagugccagcgc

SEQ ID NO: 1450 - RNA, 19 nt, Artificial Sequence
  Description of Artificial Sequence: Synthetic oligonucleotide
gggcgcgagugccagcgcu

SEQ ID NO: 1451 - RNA, 19 nt, Artificial Sequence
  Description of Artificial Sequence: Synthetic oligonucleotide
ggcgcgagugccagcgcug

SEQ ID NO: 1452 - RNA, 19 nt, Artificial Sequence
  Description of Artificial Sequence: Synthetic oligonucleotide
gcgcgagugccagcgcugg

SEQ ID NO: 1453 - RNA, 19 nt, Artificial Sequence
  Description of Artificial Sequence: Synthetic oligonucleotide
cgcgagugccagcgcuggg

SEQ ID NO: 1454 - RNA, 19 nt, Artificial Sequence
  Description of Artificial Sequence: Synthetic oligonucleotide
gcgagugccagcgcuggga

SEQ ID NO: 1455 - RNA, 19 nt, Artificial Sequence
  Description of Artificial Sequence: Synthetic oligonucleotide
cgagugccagcgcugggau

SEQ ID NO: 1456 - RNA, 19 nt, Artificial Sequence
  Description of Artificial Sequence: Synthetic oligonucleotide
gagugccagcgcugggauc

SEQ ID NO: 1457 - RNA, 19 nt, Artificial Sequence
  Description of Artificial Sequence: Synthetic oligonucleotide
agugccagcgcugggaucu

SEQ ID NO: 1458 - RNA, 19 nt, Artificial Sequence
  Description of Artificial Sequence: Synthetic oligonucleotide
gugccagcgcugggaucuu

SEQ ID NO: 1459 - RNA, 19 nt, Artificial Sequence
  Description of Artificial Sequence: Synthetic oligonucleotide
ugccagcgcugggaucuuc

SEQ ID NO: 1460 - RNA, 19 nt, Artificial Sequence
  Description of Artificial Sequence: Synthetic oligonucleotide
gccagcgcugggaucuuca

SEQ ID NO: 1461 - RNA, 19 nt, Artificial Sequence
  Description of Artificial Sequence: Synthetic oligonucleotide
ccagcgcugggaucuucag

SEQ ID NO: 1462 - RNA, 19 nt, Artificial Sequence
  Description of Artificial Sequence: Synthetic oligonucleotide
cagcgcugggaucuucagc

SEQ ID NO: 1463 - RNA, 19 nt, Artificial Sequence
  Description of Artificial Sequence: Synthetic oligonucleotide
agcgcugggaucuucagca

SEQ ID NO: 1464 - RNA, 19 nt, Artificial Sequence
  Description of Artificial Sequence: Synthetic oligonucleotide
gcgcugggaucuucagcac

SEQ ID NO: 1465 - RNA, 19 nt, Artificial Sequence
  Description of Artificial Sequence: Synthetic oligonucleotide
cgcugggaucuucagcacc

SEQ ID NO: 1466 - RNA, 19 nt, Artificial Sequence
  Description of Artificial Sequence: Synthetic oligonucleotide
gcugggaucuucagcaccc

SEQ ID NO: 1467 - RNA, 19 nt, Artificial Sequence
  Description of Artificial Sequence: Synthetic oligonucleotide
cugggaucuucagcacccg

SEQ ID NO: 1468 - RNA, 19 nt, Artificial Sequence
  Description of Artificial Sequence: Synthetic oligonucleotide
ugggaucuucagcacccgc

SEQ ID NO: 1469 - RNA, 19 nt, Artificial Sequence
  Description of Artificial Sequence: Synthetic oligonucleotide
gggaucuucagcacccgca

SEQ ID NO: 1470 - RNA, 19 nt, Artificial Sequence
  Description of Artificial Sequence: Synthetic oligonucleotide
ggaucuucagcacccgcac

SEQ ID NO: 1471 - RNA, 19 nt, Artificial Sequence
  Description of Artificial Sequence: Synthetic oligonucleotide
gaucuucagcacccgcacc

SEQ ID NO: 1472 - RNA, 19 nt, Artificial Sequence
  Description of Artificial Sequence: Synthetic oligonucleotide
aucuucagcacccgcacca

SEQ ID NO: 1473 - RNA, 19 nt, Artificial Sequence
  Description of Artificial Sequence: Synthetic oligonucleotide
ucuucagcacccgcaccag

SEQ ID NO: 1474 - RNA, 19 nt, Artificial Sequence
  Description of Artificial Sequence: Synthetic oligonucleotide
cuucagcacccgcaccagc

SEQ ID NO: 1475 - RNA, 19 nt, Artificial Sequence
  Description of Artificial Sequence: Synthetic oligonucleotide
uucagcacccgcaccagca

SEQ ID NO: 1476 - RNA, 19 nt, Artificial Sequence
  Description of Artificial Sequence: Synthetic oligonucleotide
ucagcacccgcaccagcac

SEQ ID NO: 1477 - RNA, 19 nt, Artificial Sequence
  Description of Artificial Sequence: Synthetic oligonucleotide
cagcacccgcaccagcacc

SEQ ID NO: 1478 - RNA, 19 nt, Artificial Sequence
  Description of Artificial Sequence: Synthetic oligonucleotide
agcacccgcaccagcaccc

SEQ ID NO: 1479 - RNA, 19 nt, Artificial Sequence
  Description of Artificial Sequence: Synthetic oligonucleotide
gcacccgcaccagcacccc

SEQ ID NO: 1480 - RNA, 19 nt, Artificial Sequence
  Description of Artificial Sequence: Synthetic oligonucleotide
cacccgcaccagcaccccu

SEQ ID NO: 1481 - RNA, 19 nt, Artificial Sequence
  Description of Artificial Sequence: Synthetic oligonucleotide
acccgcaccagcaccccuu

SEQ ID NO: 1482 - RNA, 19 nt, Artificial Sequence
  Description of Artificial Sequence: Synthetic oligonucleotide
cccgcaccagcaccccuuc

SEQ ID NO: 1483 - RNA, 19 nt, Artificial Sequence
  Description of Artificial Sequence: Synthetic oligonucleotide
ccgcaccagcaccccuucg

SEQ ID NO: 1484 - RNA, 19 nt, Artificial Sequence
  Description of Artificial Sequence: Synthetic oligonucleotide
cgcaccagcaccccuucga

SEQ ID NO: 1485 - RNA, 19 nt, Artificial Sequence
  Description of Artificial Sequence: Synthetic oligonucleotide
gcaccagcaccccuucgag

SEQ ID NO: 1486 - RNA, 19 nt, Artificial Sequence
  Description of Artificial Sequence: Synthetic oligonucleotide
caccagcaccccuucgagc

SEQ ID NO: 1487 - RNA, 19 nt, Artificial Sequence
  Description of Artificial Sequence: Synthetic oligonucleotide
accagcaccccuucgagcc

SEQ ID NO: 1488 - RNA, 19 nt, Artificial Sequence
  Description of Artificial Sequence: Synthetic oligonucleotide
ccagcaccccuucgagccg

SEQ ID NO: 1489 - RNA, 19 nt, Artificial Sequence
  Description of Artificial Sequence: Synthetic oligonucleotide
cagcaccccuucgagccgg

SEQ ID NO: 1490 - RNA, 19 nt, Artificial Sequence
  Description of Artificial Sequence: Synthetic oligonucleotide
agcaccccuucgagccggg

SEQ ID NO: 1491 - RNA, 19 nt, Artificial Sequence
  Description of Artificial Sequence: Synthetic oligonucleotide
gcaccccuucgagccgggc

SEQ ID NO: 1492 - RNA, 19 nt, Artificial Sequence
  Description of Artificial Sequence: Synthetic oligonucleotide
caccccuucgagccgggca

SEQ ID NO: 1493 - RNA, 19 nt, Artificial Sequence
  Description of Artificial Sequence: Synthetic oligonucleotide
accccuucgagccgggcaa

SEQ ID NO: 1494 - RNA, 19 nt, Artificial Sequence
  Description of Artificial Sequence: Synthetic oligonucleotide
ccccuucgagccgggcaag

SEQ ID NO: 1495 - RNA, 19 nt, Artificial Sequence
  Description of Artificial Sequence: Synthetic oligonucleotide
cccuucgagccgggcaagu

SEQ ID NO: 1496 - RNA, 19 nt, Artificial Sequence
  Description of Artificial Sequence: Synthetic oligonucleotide
ccuucgagccgggcaaguu

SEQ ID NO: 1497 - RNA, 19 nt, Artificial Sequence
  Description of Artificial Sequence: Synthetic oligonucleotide
cuucgagccgggcaaguuc

SEQ ID NO: 1498 - RNA, 19 nt, Artificial Sequence
  Description of Artificial Sequence: Synthetic oligonucleotide
uucgagccgggcaaguucc

SEQ ID NO: 1499 - RNA, 19 nt, Artificial Sequence
  Description of Artificial Sequence: Synthetic oligonucleotide
ucgagccgggcaaguuccu

SEQ ID NO: 1500 - RNA, 19 nt, Artificial Sequence
  Description of Artificial Sequence: Synthetic oligonucleotide
cgagccgggcaaguuccuc

SEQ ID NO: 1501 - RNA, 19 nt, Artificial Sequence
  Description of Artificial Sequence: Synthetic oligonucleotide
gagccgggcaaguuccucg

SEQ ID NO: 1502 - RNA, 19 nt, Artificial Sequence
  Description of Artificial Sequence: Synthetic oligonucleotide
agccgggcaaguuccucga

SEQ ID NO: 1503 - RNA, 19 nt, Artificial Sequence
  Description of Artificial Sequence: Synthetic oligonucleotide
gccgggcaaguuccucgac

SEQ ID NO: 1504 - RNA, 19 nt, Artificial Sequence
  Description of Artificial Sequence: Synthetic oligonucleotide
ccgggcaaguuccucgacc

SEQ ID NO: 1505 - RNA, 19 nt, Artificial Sequence
  Description of Artificial Sequence: Synthetic oligonucleotide
cgggcaaguuccucgacca

SEQ ID NO: 1506 - RNA, 19 nt, Artificial Sequence
  Description of Artificial Sequence: Synthetic oligonucleotide
gggcaaguuccucgaccaa

SEQ ID NO: 1507 - RNA, 19 nt, Artificial Sequence
  Description of Artificial Sequence: Synthetic oligonucleotide
ggcaaguuccucgaccaag

SEQ ID NO: 1508 - RNA, 19 nt, Artificial Sequence
  Description of Artificial Sequence: Synthetic oligonucleotide
gcaaguuccucgaccaagg

SEQ ID NO: 1509 - RNA, 19 nt, Artificial Sequence
  Description of Artificial Sequence: Synthetic oligonucleotide
caaguuccucgaccaaggu

SEQ ID NO: 1510 - RNA, 19 nt, Artificial Sequence
  Description of Artificial Sequence: Synthetic oligonucleotide
aaguuccucgaccaagguc

SEQ ID NO: 1511 - RNA, 19 nt, Artificial Sequence
  Description of Artificial Sequence: Synthetic oligonucleotide
aguuccucgaccaaggucu

SEQ ID NO: 1512 - RNA, 19 nt, Artificial Sequence
  Description of Artificial Sequence: Synthetic oligonucleotide
guuccucgaccaaggucug

SEQ ID NO: 1513 - RNA, 19 nt, Artificial Sequence
  Description of Artificial Sequence: Synthetic oligonucleotide
uuccucgaccaaggucugg

SEQ ID NO: 1514 - RNA, 19 nt, Artificial Sequence
  Description of Artificial Sequence: Synthetic oligonucleotide
uccucgaccaaggucugga

SEQ ID NO: 1515 - RNA, 19 nt, Artificial Sequence
  Description of Artificial Sequence: Synthetic oligonucleotide
ccucgaccaaggucuggac

SEQ ID NO: 1516 - RNA, 19 nt, Artificial Sequence
  Description of Artificial Sequence: Synthetic oligonucleotide
cucgaccaaggucuggacg

SEQ ID NO: 1517 - RNA, 19 nt, Artificial Sequence
  Description of Artificial Sequence: Synthetic oligonucleotide
ucgaccaaggucuggacga

SEQ ID NO: 1518 - RNA, 19 nt, Artificial Sequence
  Description of Artificial Sequence: Synthetic oligonucleotide
cgaccaaggucuggacgac

SEQ ID NO: 1519 - RNA, 19 nt, Artificial Sequence
  Description of Artificial Sequence: Synthetic oligonucleotide
gaccaaggucuggacgaca

SEQ ID NO: 1520 - RNA, 19 nt, Artificial Sequence
  Description of Artificial Sequence: Synthetic oligonucleotide
accaaggucuggacgacaa

SEQ ID NO: 1521 - RNA, 19 nt, Artificial Sequence
  Description of Artificial Sequence: Synthetic oligonucleotide
ccaaggucuggacgacaac

SEQ ID NO: 1522 - RNA, 19 nt, Artificial Sequence
  Description of Artificial Sequence: Synthetic oligonucleotide
caaggucuggacgacaacu

SEQ ID NO: 1523 - RNA, 19 nt, Artificial Sequence
  Description of Artificial Sequence: Synthetic oligonucleotide
aaggucuggacgacaacua

SEQ ID NO: 1524 - RNA, 19 nt, Artificial Sequence
  Description of Artificial Sequence: Synthetic oligonucleotide
aggucuggacgacaacuau

SEQ ID NO: 1525 - RNA, 19 nt, Artificial Sequence
  Description of Artificial Sequence: Synthetic oligonucleotide
ggucuggacgacaacuauu

SEQ ID NO: 1526 - RNA, 19 nt, Artificial Sequence
  Description of Artificial Sequence: Synthetic oligonucleotide
gucuggacgacaacuauug

SEQ ID NO: 1527 - RNA, 19 nt, Artificial Sequence
  Description of Artificial Sequence: Synthetic oligonucleotide
ucuggacgacaacuauugc

SEQ ID NO: 1528 - RNA, 19 nt, Artificial Sequence
  Description of Artificial Sequence: Synthetic oligonucleotide
cuggacgacaacuauugcc

SEQ ID NO: 1529 - RNA, 19 nt, Artificial Sequence
  Description of Artificial Sequence: Synthetic oligonucleotide
uggacgacaacuauugccg

SEQ ID NO: 1530 - RNA, 19 nt, Artificial Sequence
  Description of Artificial Sequence: Synthetic oligonucleotide
ggacgacaacuauugccgg

SEQ ID NO: 1531 - RNA, 19 nt, Artificial Sequence
  Description of Artificial Sequence: Synthetic oligonucleotide
gacgacaacuauugccgga

SEQ ID NO: 1532 - RNA, 19 nt, Artificial Sequence
  Description of Artificial Sequence: Synthetic oligonucleotide
acgacaacuauugccggaa

SEQ ID NO: 1533 - RNA, 19 nt, Artificial Sequence
  Description of Artificial Sequence: Synthetic oligonucleotide
cgacaacuauugccggaau

SEQ ID NO: 1534 - RNA, 19 nt, Artificial Sequence
  Description of Artificial Sequence: Synthetic oligonucleotide
gacaacuauugccggaauc

SEQ ID NO: 1535 - RNA, 19 nt, Artificial Sequence
  Description of Artificial Sequence: Synthetic oligonucleotide
acaacuauugccggaaucc

SEQ ID NO: 1536 - RNA, 19 nt, Artificial Sequence
  Description of Artificial Sequence: Synthetic oligonucleotide
caacuauugccggaauccu

SEQ ID NO: 1537 - RNA, 19 nt, Artificial Sequence
  Description of Artificial Sequence: Synthetic oligonucleotide
aacuauugccggaauccug

SEQ ID NO: 1538 - RNA, 19 nt, Artificial Sequence
  Description of Artificial Sequence: Synthetic oligonucleotide
acuauugccggaauccuga

SEQ ID NO: 1539 - RNA, 19 nt, Artificial Sequence
  Description of Artificial Sequence: Synthetic oligonucleotide
cuauugccggaauccugac

SEQ ID NO: 1540 - RNA, 19 nt, Artificial Sequence
  Description of Artificial Sequence: Synthetic oligonucleotide
uauugccggaauccugacg

SEQ ID NO: 1541 - RNA, 19 nt, Artificial Sequence
  Description of Artificial Sequence: Synthetic oligonucleotide
auugccggaauccugacgg

SEQ ID NO: 1542 - RNA, 19 nt, Artificial Sequence
  Description of Artificial Sequence: Synthetic oligonucleotide
uugccggaauccugacggc

SEQ ID NO: 1543 - RNA, 19 nt, Artificial Sequence
  Description of Artificial Sequence: Synthetic oligonucleotide
ugccggaauccugacggcu

SEQ ID NO: 1544 - RNA, 19 nt, Artificial Sequence
  Description of Artificial Sequence: Synthetic oligonucleotide
gccggaauccugacggcuc

SEQ ID NO: 1545 - RNA, 19 nt, Artificial Sequence
  Description of Artificial Sequence: Synthetic oligonucleotide
ccggaauccugacggcucc

SEQ ID NO: 1546 - RNA, 19 nt, Artificial Sequence
  Description of Artificial Sequence: Synthetic oligonucleotide
cggaauccugacggcuccg

SEQ ID NO: 1547 - RNA, 19 nt, Artificial Sequence
  Description of Artificial Sequence: Synthetic oligonucleotide
ggaauccugacggcuccga

SEQ ID NO: 1548 - RNA, 19 nt, Artificial Sequence
  Description of Artificial Sequence: Synthetic oligonucleotide
gaauccugacggcuccgag

SEQ ID NO: 1549 - RNA, 19 nt, Artificial Sequence
  Description of Artificial Sequence: Synthetic oligonucleotide
aauccugacggcuccgagc

SEQ ID NO: 1550 - RNA, 19 nt, Artificial Sequence
  Description of Artificial Sequence: Synthetic oligonucleotide
auccugacggcuccgagcg

SEQ ID NO: 1551 - RNA, 19 nt, Artificial Sequence
  Description of Artificial Sequence: Synthetic oligonucleotide
uccugacggcuccgagcgg

SEQ ID NO: 1552 - RNA, 19 nt, Artificial Sequence
  Description of Artificial Sequence: Synthetic oligonucleotide
ccugacggcuccgagcggc

SEQ ID NO: 1553 - RNA, 19 nt, Artificial Sequence
  Description of Artificial Sequence: Synthetic oligonucleotide
cugacggcuccgagcggcc

SEQ ID NO: 1554 - RNA, 19 nt, Artificial Sequence
  Description of Artificial Sequence: Synthetic oligonucleotide
ugacggcuccgagcggcca

SEQ ID NO: 1555 - RNA, 19 nt, Artificial Sequence
  Description of Artificial Sequence: Synthetic oligonucleotide
gacggcuccgagcggccau

SEQ ID NO: 1556 - RNA, 19 nt, Artificial Sequence
  Description of Artificial Sequence: Synthetic oligonucleotide
acggcuccgagcggccaug

SEQ ID NO: 1557 - RNA, 19 nt, Artificial Sequence
  Description of Artificial Sequence: Synthetic oligonucleotide
cggcuccgagcggccaugg

SEQ ID NO: 1558 - RNA, 19 nt, Artificial Sequence
  Description of Artificial Sequence: Synthetic oligonucleotide
ggcuccgagcggccauggu

SEQ ID NO: 1559 - RNA, 19 nt, Artificial Sequence
  Description of Artificial Sequence: Synthetic oligonucleotide
gcuccgagcggccauggug

SEQ ID NO: 1560 - RNA, 19 nt, Artificial Sequence
  Description of Artificial Sequence: Synthetic oligonucleotide
cuccgagcggccauggugc

SEQ ID NO: 1561 - RNA, 19 nt, Artificial Sequence
  Description of Artificial Sequence: Synthetic oligonucleotide
uccgagcggccauggugcu

SEQ ID NO: 1562 - RNA, 19 nt, Artificial Sequence
  Description of Artificial Sequence: Synthetic oligonucleotide
ccgagcggccauggugcua

SEQ ID NO: 1563 - RNA, 19 nt, Artificial Sequence
  Description of Artificial Sequence: Synthetic oligonucleotide
cgagcggccauggugcuac

SEQ ID NO: 1564 - RNA, 19 nt, Artificial Sequence
  Description of Artificial Sequence: Synthetic oligonucleotide
gagcggccauggugcuaca

SEQ ID NO: 1565 - RNA, 19 nt, Artificial Sequence
  Description of Artificial Sequence: Synthetic oligonucleotide
agcggccauggugcuacac

SEQ ID NO: 1566 - RNA, 19 nt, Artificial Sequence
  Description of Artificial Sequence: Synthetic oligonucleotide
gcggccauggugcuacacu

SEQ ID NO: 1567 - RNA, 19 nt, Artificial Sequence
  Description of Artificial Sequence: Synthetic oligonucleotide
cggccauggugcuacacua

SEQ ID NO: 1568 - RNA, 19 nt, Artificial Sequence
  Description of Artificial Sequence: Synthetic oligonucleotide
ggccauggugcuacacuac

SEQ ID NO: 1569 - RNA, 19 nt, Artificial Sequence
  Description of Artificial Sequence: Synthetic oligonucleotide
gccauggugcuacacuacg

SEQ ID NO: 1570 - RNA, 19 nt, Artificial Sequence
  Description of Artificial Sequence: Synthetic oligonucleotide
ccauggugcuacacuacgg

SEQ ID NO: 1571 - RNA, 19 nt, Artificial Sequence
  Description of Artificial Sequence: Synthetic oligonucleotide
cauggugcuacacuacgga

SEQ ID NO: 1572 - RNA, 19 nt, Artificial Sequence
  Description of Artificial Sequence: Synthetic oligonucleotide
auggugcuacacuacggau

SEQ ID NO: 1573 - RNA, 19 nt, Artificial Sequence
  Description of Artificial Sequence: Synthetic oligonucleotide
uggugcuacacuacggauc

SEQ ID NO: 1574 - RNA, 19 nt, Artificial Sequence
  Description of Artificial Sequence: Synthetic oligonucleotide
ggugcuacacuacggaucc

SEQ ID NO: 1575 - RNA, 19 nt, Artificial Sequence
  Description of Artificial Sequence: Synthetic oligonucleotide
gugcuacacuacggauccg

SEQ ID NO: 1576 - RNA, 19 nt, Artificial Sequence
  Description of Artificial Sequence: Synthetic oligonucleotide
ugcuacacuacggauccgc

SEQ ID NO: 1577 - RNA, 19 nt, Artificial Sequence
  Description of Artificial Sequence: Synthetic oligonucleotide
gcuacacuacggauccgca

SEQ ID NO: 1578 - RNA, 19 nt, Artificial Sequence
  Description of Artificial Sequence: Synthetic oligonucleotide
cuacacuacggauccgcag

SEQ ID NO: 1579 - RNA, 19 nt, Artificial Sequence
  Description of Artificial Sequence: Synthetic oligonucleotide
uacacuacggauccgcaga

SEQ ID NO: 1580 - RNA, 19 nt, Artificial Sequence
  Description of Artificial Sequence: Synthetic oligonucleotide
acacuacggauccgcagau

SEQ ID NO: 1581 - RNA, 19 nt, Artificial Sequence
  Description of Artificial Sequence: Synthetic oligonucleotide
cacuacggauccgcagauc

SEQ ID NO: 1582 - RNA, 19 nt, Artificial Sequence
  Description of Artificial Sequence: Synthetic oligonucleotide
acuacggauccgcagaucg

SEQ ID NO: 1583 - RNA, 19 nt, Artificial Sequence
  Description of Artificial Sequence: Synthetic oligonucleotide
cuacggauccgcagaucga

SEQ ID NO: 1584 - RNA, 19 nt, Artificial Sequence
  Description of Artificial Sequence: Synthetic oligonucleotide
uacggauccgcagaucgag

SEQ ID NO: 1585 - RNA, 19 nt, Artificial Sequence
  Description of Artificial Sequence: Synthetic oligonucleotide
acggauccgcagaucgagc

SEQ ID NO: 1586 - RNA, 19 nt, Artificial Sequence
  Description of Artificial Sequence: Synthetic oligonucleotide
cggauccgcagaucgagcg

SEQ ID NO: 1587 - RNA, 19 nt, Artificial Sequence
  Description of Artificial Sequence: Synthetic oligonucleotide
ggauccgcagaucgagcga

SEQ ID NO: 1588 - RNA, 19 nt, Artificial Sequence
  Description of Artificial Sequence: Synthetic oligonucleotide
gauccgcagaucgagcgag

SEQ ID NO: 1589 - RNA, 19 nt, Artificial Sequence
  Description of Artificial Sequence: Synthetic oligonucleotide
auccgcagaucgagcgaga

SEQ ID NO: 1590 - RNA, 19 nt, Artificial Sequence
  Description of Artificial Sequence: Synthetic oligonucleotide
uccgcagaucgagcgagag

SEQ ID NO: 1591 - RNA, 19 nt, Artificial Sequence
  Description of Artificial Sequence: Synthetic oligonucleotide
ccgcagaucgagcgagagu

SEQ ID NO: 1592 - RNA, 19 nt, Artificial Sequence
  Description of Artificial Sequence: Synthetic oligonucleotide
cgcagaucgagcgagaguu

SEQ ID NO: 1593 - RNA, 19 nt, Artificial Sequence
  Description of Artificial Sequence: Synthetic oligonucleotide
gcagaucgagcgagaguuc

SEQ ID NO: 1594 - RNA, 19 nt, Artificial Sequence
  Description of Artificial Sequence: Synthetic oligonucleotide
cagaucgagcgagaguucu

SEQ ID NO: 1595 - RNA, 19 nt, Artificial Sequence
  Description of Artificial Sequence: Synthetic oligonucleotide
agaucgagcgagaguucug

SEQ ID NO: 1596 - RNA, 19 nt, Artificial Sequence
  Description of Artificial Sequence: Synthetic oligonucleotide
gaucgagcgagaguucugu

SEQ ID NO: 1597 - RNA, 19 nt, Artificial Sequence
  Description of Artificial Sequence: Synthetic oligonucleotide
aucgagcgagaguucugug

SEQ ID NO: 1598 - RNA, 19 nt, Artificial Sequence
  Description of Artificial Sequence: Synthetic oligonucleotide
ucgagcgagaguucuguga

SEQ ID NO: 1599 - RNA, 19 nt, Artificial Sequence
  Description of Artificial Sequence: Synthetic oligonucleotide
cgagcgagaguucugugac

SEQ ID NO: 1600 - RNA, 19 nt, Artificial Sequence
  Description of Artificial Sequence: Synthetic oligonucleotide
gagcgagaguucugugacc

SEQ ID NO: 1601 - RNA, 19 nt, Artificial Sequence
  Description of Artificial Sequence: Synthetic oligonucleotide
agcgagaguucugugaccu

SEQ ID NO: 1602 - RNA, 19 nt, Artificial Sequence
  Description of Artificial Sequence: Synthetic oligonucleotide
gcgagaguucugugaccuc

SEQ ID NO: 1603 - RNA, 19 nt, Artificial Sequence
  Description of Artificial Sequence: Synthetic oligonucleotide
cgagaguucugugaccucc

SEQ ID NO: 1604 - RNA, 19 nt, Artificial Sequence
  Description of Artificial Sequence: Synthetic oligonucleotide
gagaguucugugaccuccc

SEQ ID NO: 1605 - RNA, 19 nt, Artificial Sequence
  Description of Artificial Sequence: Synthetic oligonucleotide
agaguucugugaccucccc

SEQ ID NO: 1606 - RNA, 19 nt, Artificial Sequence
  Description of Artificial Sequence: Synthetic oligonucleotide
gaguucugugaccuccccc

SEQ ID NO: 1607 - RNA, 19 nt, Artificial Sequence
  Description of Artificial Sequence: Synthetic oligonucleotide
aguucugugaccucccccg

SEQ ID NO: 1608 - RNA, 19 nt, Artificial Sequence
  Description of Artificial Sequence: Synthetic oligonucleotide
guucugugaccucccccgc

SEQ ID NO: 1609 - RNA, 19 nt, Artificial Sequence
  Description of Artificial Sequence: Synthetic oligonucleotide
uucugugaccucccccgcu

SEQ ID NO: 1610 - RNA, 19 nt, Artificial Sequence
  Description of Artificial Sequence: Synthetic oligonucleotide
ucugugaccucccccgcug

SEQ ID NO: 1611 - RNA, 19 nt, Artificial Sequence
  Description of Artificial Sequence: Synthetic oligonucleotide
cugugaccucccccgcugc

SEQ ID NO: 1612 - RNA, 19 nt, Artificial Sequence
  Description of Artificial Sequence: Synthetic oligonucleotide
ugugaccucccccgcugcg

SEQ ID NO: 1613 - RNA, 19 nt, Artificial Sequence
  Description of Artificial Sequence: Synthetic oligonucleotide
gugaccucccccgcugcgg

SEQ ID NO: 1614 - RNA, 19 nt, Artificial Sequence
  Description of Artificial Sequence: Synthetic oligonucleotide
ugaccucccccgcugcggg

SEQ ID NO: 1615 - RNA, 19 nt, Artificial Sequence
  Description of Artificial Sequence: Synthetic oligonucleotide
gaccucccccgcugcgggu

SEQ ID NO: 1616 - RNA, 19 nt, Artificial Sequence
  Description of Artificial Sequence: Synthetic oligonucleotide
accucccccgcugcggguc

SEQ ID NO: 1617 - RNA, 19 nt, Artificial Sequence
  Description of Artificial Sequence: Synthetic oligonucleotide
ccucccccgcugcgggucc

SEQ ID NO: 1618 - RNA, 19 nt, Artificial Sequence
  Description of Artificial Sequence: Synthetic oligonucleotide
cucccccgcugcggguccg

SEQ ID NO: 1619 - RNA, 19 nt, Artificial Sequence
  Description of Artificial Sequence: Synthetic oligonucleotide
ucccccgcugcggguccga

SEQ ID NO: 1620 - RNA, 19 nt, Artificial Sequence
  Description of Artificial Sequence: Synthetic oligonucleotide
cccccgcugcggguccgag

SEQ ID NO: 1621 - RNA, 19 nt, Artificial Sequence
  Description of Artificial Sequence: Synthetic oligonucleotide
ccccgcugcggguccgagg

SEQ ID NO: 1622 - RNA, 19 nt, Artificial Sequence
  Description of Artificial Sequence: Synthetic oligonucleotide
cccgcugcggguccgaggc

SEQ ID NO: 1623 - RNA, 19 nt, Artificial Sequence
  Description of Artificial Sequence: Synthetic oligonucleotide
ccgcugcggguccgaggca

SEQ ID NO: 1624 - RNA, 19 nt, Artificial Sequence
  Description of Artificial Sequence: Synthetic oligonucleotide
cgcugcggguccgaggcac

SEQ ID NO: 1625 - RNA, 19 nt, Artificial Sequence
  Description of Artificial Sequence: Synthetic oligonucleotide
gcugcggguccgaggcaca

SEQ ID NO: 1626 - RNA, 19 nt, Artificial Sequence
  Description of Artificial Sequence: Synthetic oligonucleotide
cugcggguccgaggcacag

SEQ ID NO: 1627 - RNA, 19 nt, Artificial Sequence
  Description of Artificial Sequence: Synthetic oligonucleotide
ugcggguccgaggcacagc

SEQ ID NO: 1628 - RNA, 19 nt, Artificial Sequence
  Description of Artificial Sequence: Synthetic oligonucleotide
gcggguccgaggcacagcc

SEQ ID NO: 1629 - RNA, 19 nt, Artificial Sequence
  Description of Artificial Sequence: Synthetic oligonucleotide
cggguccgaggcacagccc

SEQ ID NO: 1630 - RNA, 19 nt, Artificial Sequence
  Description of Artificial Sequence: Synthetic oligonucleotide
ggguccgaggcacagcccc

SEQ ID NO: 1631 - RNA, 19 nt, Artificial Sequence
  Description of Artificial Sequence: Synthetic oligonucleotide
gguccgaggcacagccccg

SEQ ID NO: 1632 - RNA, 19 nt, Artificial Sequence
  Description of Artificial Sequence: Synthetic oligonucleotide
guccgaggcacagccccgc

SEQ ID NO: 1633 - RNA, 19 nt, Artificial Sequence
  Description of Artificial Sequence: Synthetic oligonucleotide
uccgaggcacagccccgcc

SEQ ID NO: 1634 - RNA, 19 nt, Artificial Sequence
  Description of Artificial Sequence: Synthetic oligonucleotide
ccgaggcacagccccgcca

SEQ ID NO: 1635 - RNA, 19 nt, Artificial Sequence
  Description of Artificial Sequence: Synthetic oligonucleotide
cgaggcacagccccgccaa

SEQ ID NO: 1636 - RNA, 19 nt, Artificial Sequence
  Description of Artificial Sequence: Synthetic oligonucleotide
gaggcacagccccgccaag

SEQ ID NO: 1637 - RNA, 19 nt, Artificial Sequence
  Description of Artificial Sequence: Synthetic oligonucleotide
aggcacagccccgccaaga

SEQ ID NO: 1638 - RNA, 19 nt, Artificial Sequence
  Description of Artificial Sequence: Synthetic oligonucleotide
ggcacagccccgccaagag

SEQ ID NO: 1639 - RNA, 19 nt, Artificial Sequence
  Description of Artificial Sequence: Synthetic oligonucleotide
gcacagccccgccaagagg

SEQ ID NO: 1640 - RNA, 19 nt, Artificial Sequence
  Description of Artificial Sequence: Synthetic oligonucleotide
cacagccccgccaagaggc

SEQ ID NO: 1641 - RNA, 19 nt, Artificial Sequence
  Description of Artificial Sequence: Synthetic oligonucleotide
acagccccgccaagaggcc

SEQ ID NO: 1642 - RNA, 19 nt, Artificial Sequence
  Description of Artificial Sequence: Synthetic oligonucleotide
cagccccgccaagaggcca

SEQ ID NO: 1643 - RNA, 19 nt, Artificial Sequence
  Description of Artificial Sequence: Synthetic oligonucleotide
agccccgccaagaggccac

SEQ ID NO: 1644 - RNA, 19 nt, Artificial Sequence
  Description of Artificial Sequence: Synthetic oligonucleotide
gccccgccaagaggccaca

SEQ ID NO: 1645 - RNA, 19 nt, Artificial Sequence
  Description of Artificial Sequence: Synthetic oligonucleotide
ccccgccaagaggccacaa

SEQ ID NO: 1646 - RNA, 19 nt, Artificial Sequence
  Description of Artificial Sequence: Synthetic oligonucleotide
cccgccaagaggccacaac

SEQ ID NO: 1647 - RNA, 19 nt, Artificial Sequence
  Description of Artificial Sequence: Synthetic oligonucleotide
ccgccaagaggccacaacu

SEQ ID NO: 1648 - RNA, 19 nt, Artificial Sequence
  Description of Artificial Sequence: Synthetic oligonucleotide
cgccaagaggccacaacug

SEQ ID NO: 1649 - RNA, 19 nt, Artificial Sequence
  Description of Artificial Sequence: Synthetic oligonucleotide
gccaagaggccacaacugu

SEQ ID NO: 1650 - RNA, 19 nt, Artificial Sequence
  Description of Artificial Sequence: Synthetic oligonucleotide
ccaagaggccacaacuguc

SEQ ID NO: 1651 - RNA, 19 nt, Artificial Sequence
  Description of Artificial Sequence: Synthetic oligonucleotide
caagaggccacaacuguca

SEQ ID NO: 1652 - RNA, 19 nt, Artificial Sequence
  Description of Artificial Sequence: Synthetic oligonucleotide
aagaggccacaacugucag

SEQ ID NO: 1653 - RNA, 19 nt, Artificial Sequence
  Description of Artificial Sequence: Synthetic oligonucleotide
agaggccacaacugucagc

SEQ ID NO: 1654 - RNA, 19 nt, Artificial Sequence
  Description of Artificial Sequence: Synthetic oligonucleotide
gaggccacaacugucagcu

SEQ ID NO: 1655 - RNA, 19 nt, Artificial Sequence
  Description of Artificial Sequence: Synthetic oligonucleotide
aggccacaacugucagcug

SEQ ID NO: 1656 - RNA, 19 nt, Artificial Sequence
  Description of Artificial Sequence: Synthetic oligonucleotide
ggccacaacugucagcugc

SEQ ID NO: 1657 - RNA, 19 nt, Artificial Sequence
  Description of Artificial Sequence: Synthetic oligonucleotide
gccacaacugucagcugcu

SEQ ID NO: 1658 - RNA, 19 nt, Artificial Sequence
  Description of Artificial Sequence: Synthetic oligonucleotide
ccacaacugucagcugcuu

SEQ ID NO: 1659 - RNA, 19 nt, Artificial Sequence
  Description of Artificial Sequence: Synthetic oligonucleotide
cacaacugucagcugcuuc

SEQ ID NO: 1660 - RNA, 19 nt, Artificial Sequence
  Description of Artificial Sequence: Synthetic oligonucleotide
acaacugucagcugcuucc

SEQ ID NO: 1661 - RNA, 19 nt, Artificial Sequence
  Description of Artificial Sequence: Synthetic oligonucleotide
caacugucagcugcuuccg

SEQ ID NO: 1662 - RNA, 19 nt, Artificial Sequence
  Description of Artificial Sequence: Synthetic oligonucleotide
aacugucagcugcuuccgc

SEQ ID NO: 1663 - RNA, 19 nt, Artificial Sequence
  Description of Artificial Sequence: Synthetic oligonucleotide
acugucagcugcuuccgcg

SEQ ID NO: 1664 - RNA, 19 nt, Artificial Sequence
  Description of Artificial Sequence: Synthetic oligonucleotide
cugucagcugcuuccgcgg

SEQ ID NO: 1665 - RNA, 19 nt, Artificial Sequence
  Description of Artificial Sequence: Synthetic oligonucleotide
ugucagcugcuuccgcggg

SEQ ID NO: 1666 - RNA, 19 nt, Artificial Sequence
  Description of Artificial Sequence: Synthetic oligonucleotide
gucagcugcuuccgcggga

SEQ ID NO: 1667 - RNA, 19 nt, Artificial Sequence
  Description of Artificial Sequence: Synthetic oligonucleotide
ucagcugcuuccgcgggaa

SEQ ID NO: 1668 - RNA, 19 nt, Artificial Sequence
  Description of Artificial Sequence: Synthetic oligonucleotide
cagcugcuuccgcgggaag

SEQ ID NO: 1669 - RNA, 19 nt, Artificial Sequence
  Description of Artificial Sequence: Synthetic oligonucleotide
agcugcuuccgcgggaagg

SEQ ID NO: 1670 - RNA, 19 nt, Artificial Sequence
  Description of Artificial Sequence: Synthetic oligonucleotide
gcugcuuccgcgggaaggg

SEQ ID NO: 1671 - RNA, 19 nt, Artificial Sequence
  Description of Artificial Sequence: Synthetic oligonucleotide
cugcuuccgcgggaagggu

SEQ ID NO: 1672 - RNA, 19 nt, Artificial Sequence
  Description of Artificial Sequence: Synthetic oligonucleotide
ugcuuccgcgggaagggug

SEQ ID NO: 1673 - RNA, 19 nt, Artificial Sequence
  Description of Artificial Sequence: Synthetic oligonucleotide
gcuuccgcgggaaggguga

SEQ ID NO: 1674 - RNA, 19 nt, Artificial Sequence
  Description of Artificial Sequence: Synthetic oligonucleotide
cuuccgcgggaagggugag

SEQ ID NO: 1675 - RNA, 19 nt, Artificial Sequence
  Description of Artificial Sequence: Synthetic oligonucleotide
uuccgcgggaagggugagg

SEQ ID NO: 1676 - RNA, 19 nt, Artificial Sequence
  Description of Artificial Sequence: Synthetic oligonucleotide
uccgcgggaagggugaggg

SEQ ID NO: 1677 - RNA, 19 nt, Artificial Sequence
  Description of Artificial Sequence: Synthetic oligonucleotide
ccgcgggaagggugagggc

SEQ ID NO: 1678 - RNA, 19 nt, Artificial Sequence
  Description of Artificial Sequence: Synthetic oligonucleotide
cgcgggaagggugagggcu

SEQ ID NO: 1679 - RNA, 19 nt, Artificial Sequence
  Description of Artificial Sequence: Synthetic oligonucleotide
gcgggaagggugagggcua

SEQ ID NO: 1680 - RNA, 19 nt, Artificial Sequence
  Description of Artificial Sequence: Synthetic oligonucleotide
cgggaagggugagggcuac

SEQ ID NO: 1681 - RNA, 19 nt, Artificial Sequence
  Description of Artificial Sequence: Synthetic oligonucleotide
gggaagggugagggcuacc

SEQ ID NO: 1682 - RNA, 19 nt, Artificial Sequence
  Description of Artificial Sequence: Synthetic oligonucleotide
ggaagggugagggcuaccg

SEQ ID NO: 1683 - RNA, 19 nt, Artificial Sequence
  Description of Artificial Sequence: Synthetic oligonucleotide
gaagggugagggcuaccgg

SEQ ID NO: 1684 - RNA, 19 nt, Artificial Sequence
  Description of Artificial Sequence: Synthetic oligonucleotide
aagggugagggcuaccggg

SEQ ID NO: 1685 - RNA, 19 nt, Artificial Sequence
  Description of Artificial Sequence: Synthetic oligonucleotide
agggugagggcuaccgggg

SEQ ID NO: 1686 - RNA, 19 nt, Artificial Sequence
  Description of Artificial Sequence: Synthetic oligonucleotide
gggugagggcuaccggggc

SEQ ID NO: 1687 - RNA, 19 nt, Artificial Sequence
  Description of Artificial Sequence: Synthetic oligonucleotide
ggugagggcuaccggggca

SEQ ID NO: 1688 - RNA, 19 nt, Artificial Sequence
  Description of Artificial Sequence: Synthetic oligonucleotide
gugagggcuaccggggcac

SEQ ID NO: 1689 - RNA, 19 nt, Artificial Sequence
  Description of Artificial Sequence: Synthetic oligonucleotide
ugagggcuaccggggcaca

SEQ ID NO: 1690 - RNA, 19 nt, Artificial Sequence
  Description of Artificial Sequence: Synthetic oligonucleotide
gagggcuaccggggcacag

SEQ ID NO: 1691 - RNA, 19 nt, Artificial Sequence
  Description of Artificial Sequence: Synthetic oligonucleotide
agggcuaccggggcacagc

SEQ ID NO: 1692 - RNA, 19 nt, Artificial Sequence
  Description of Artificial Sequence: Synthetic oligonucleotide
gggcuaccggggcacagcc

SEQ ID NO: 1693 - RNA, 19 nt, Artificial Sequence
  Description of Artificial Sequence: Synthetic oligonucleotide
ggcuaccggggcacagcca

SEQ ID NO: 1694 - RNA, 19 nt, Artificial Sequence
  Description of Artificial Sequence: Synthetic oligonucleotide
gcuaccggggcacagccaa

SEQ ID NO: 1695 - RNA, 19 nt, Artificial Sequence
  Description of Artificial Sequence: Synthetic oligonucleotide
cuaccggggcacagccaau

SEQ ID NO: 1696 - RNA, 19 nt, Artificial Sequence
  Description of Artificial Sequence: Synthetic oligonucleotide
uaccggggcacagccaaua

SEQ ID NO: 1697 - RNA, 19 nt, Artificial Sequence
  Description of Artificial Sequence: Synthetic oligonucleotide
accggggcacagccaauac

SEQ ID NO: 1698 - RNA, 19 nt, Artificial Sequence
  Description of Artificial Sequence: Synthetic oligonucleotide
ccggggcacagccaauacc

SEQ ID NO: 1699 - RNA, 19 nt, Artificial Sequence
  Description of Artificial Sequence: Synthetic oligonucleotide
cggggcacagccaauacca

SEQ ID NO: 1700 - RNA, 19 nt, Artificial Sequence
  Description of Artificial Sequence: Synthetic oligonucleotide
ggggcacagccaauaccac

SEQ ID NO: 1701 - RNA, 19 nt, Artificial Sequence
  Description of Artificial Sequence: Synthetic oligonucleotide
gggcacagccaauaccacc

SEQ ID NO: 1702 - RNA, 19 nt, Artificial Sequence
  Description of Artificial Sequence: Synthetic oligonucleotide
ggcacagccaauaccacca

SEQ ID NO: 1703 - RNA, 19 nt, Artificial Sequence
  Description of Artificial Sequence: Synthetic oligonucleotide
gcacagccaauaccaccac

SEQ ID NO: 1704 - RNA, 19 nt, Artificial Sequence
  Description of Artificial Sequence: Synthetic oligonucleotide
cacagccaauaccaccacu

SEQ ID NO: 1705 - RNA, 19 nt, Artificial Sequence
  Description of Artificial Sequence: Synthetic oligonucleotide
acagccaauaccaccacug

SEQ ID NO: 1706 - RNA, 19 nt, Artificial Sequence
  Description of Artificial Sequence: Synthetic oligonucleotide
cagccaauaccaccacugc

SEQ ID NO: 1707 - RNA, 19 nt, Artificial Sequence
  Description of Artificial Sequence: Synthetic oligonucleotide
agccaauaccaccacugcg

SEQ ID NO: 1708 - RNA, 19 nt, Artificial Sequence
  Description of Artificial Sequence: Synthetic oligonucleotide
gccaauaccaccacugcgg

SEQ ID NO: 1709 - RNA, 19 nt, Artificial Sequence
  Description of Artificial Sequence: Synthetic oligonucleotide
ccaauaccaccacugcggg

SEQ ID NO: 1710 - RNA, 19 nt, Artificial Sequence
  Description of Artificial Sequence: Synthetic oligonucleotide
caauaccaccacugcgggc

SEQ ID NO: 1711 - RNA, 19 nt, Artificial Sequence
  Description of Artificial Sequence: Synthetic oligonucleotide
aauaccaccacugcgggcg

SEQ ID NO: 1712 - RNA, 19 nt, Artificial Sequence
  Description of Artificial Sequence: Synthetic oligonucleotide
auaccaccacugcgggcgu

SEQ ID NO: 1713 - RNA, 19 nt, Artificial Sequence
  Description of Artificial Sequence: Synthetic oligonucleotide
uaccaccacugcgggcgua

SEQ ID NO: 1714 - RNA, 19 nt, Artificial Sequence
  Description of Artificial Sequence: Synthetic oligonucleotide
accaccacugcgggcguac

SEQ ID NO: 1715 - RNA, 19 nt, Artificial Sequence
  Description of Artificial Sequence: Synthetic oligonucleotide
ccaccacugcgggcguacc

SEQ ID NO: 1716 - RNA, 19 nt, Artificial Sequence
  Description of Artificial Sequence: Synthetic oligonucleotide
caccacugcgggcguaccu

SEQ ID NO: 1717 - RNA, 19 nt, Artificial Sequence
  Description of Artificial Sequence: Synthetic oligonucleotide
accacugcgggcguaccuu

SEQ ID NO: 1718 - RNA, 19 nt, Artificial Sequence
  Description of Artificial Sequence: Synthetic oligonucleotide
ccacugcgggcguaccuug

SEQ ID NO: 1719 - RNA, 19 nt, Artificial Sequence
  Description of Artificial Sequence: Synthetic oligonucleotide
cacugcgggcguaccuugc

SEQ ID NO: 1720 - RNA, 19 nt, Artificial Sequence
  Description of Artificial Sequence: Synthetic oligonucleotide
acugcgggcguaccuugcc

SEQ ID NO: 1721 - RNA, 19 nt, Artificial Sequence
  Description of Artificial Sequence: Synthetic oligonucleotide
cugcgggcguaccuugcca

SEQ ID NO: 1722 - RNA, 19 nt, Artificial Sequence
  Description of Artificial Sequence: Synthetic oligonucleotide
ugcgggcguaccuugccag

SEQ ID NO: 1723 - RNA, 19 nt, Artificial Sequence
  Description of Artificial Sequence: Synthetic oligonucleotide
gcgggcguaccuugccagc

SEQ ID NO: 1724 - RNA, 19 nt, Artificial Sequence
  Description of Artificial Sequence: Synthetic oligonucleotide
cgggcguaccuugccagcg

SEQ ID NO: 1725 - RNA, 19 nt, Artificial Sequence
  Description of Artificial Sequence: Synthetic oligonucleotide
gggcguaccuugccagcgu

SEQ ID NO: 1726 - RNA, 19 nt, Artificial Sequence
  Description of Artificial Sequence: Synthetic oligonucleotide
ggcguaccuugccagcguu

SEQ ID NO: 1727 - RNA, 19 nt, Artificial Sequence
  Description of Artificial Sequence: Synthetic oligonucleotide
gcguaccuugccagcguug

SEQ ID NO: 1728 - RNA, 19 nt, Artificial Sequence
  Description of Artificial Sequence: Synthetic oligonucleotide
cguaccuugccagcguugg

SEQ ID NO: 1729 - RNA, 19 nt, Artificial Sequence
  Description of Artificial Sequence: Synthetic oligonucleotide
guaccuugccagcguuggg

SEQ ID NO: 1730 - RNA, 19 nt, Artificial Sequence
  Description of Artificial Sequence: Synthetic oligonucleotide
uaccuugccagcguuggga

SEQ ID NO: 1731 - RNA, 19 nt, Artificial Sequence
  Description of Artificial Sequence: Synthetic oligonucleotide
accuugccagcguugggac

SEQ ID NO: 1732 - RNA, 19 nt, Artificial Sequence
  Description of Artificial Sequence: Synthetic oligonucleotide
ccuugccagcguugggacg

SEQ ID NO: 1733 - RNA, 19 nt, Artificial Sequence
  Description of Artificial Sequence: Synthetic oligonucleotide
cuugccagcguugggacgc

SEQ ID NO: 1734 - RNA, 19 nt, Artificial Sequence
  Description of Artificial Sequence: Synthetic oligonucleotide
uugccagcguugggacgcg

SEQ ID NO: 1735 - RNA, 19 nt, Artificial Sequence
  Description of Artificial Sequence: Synthetic oligonucleotide
ugccagcguugggacgcgc

SEQ ID NO: 1736 - RNA, 19 nt, Artificial Sequence
  Description of Artificial Sequence: Synthetic oligonucleotide
gccagcguugggacgcgca

SEQ ID NO: 1737 - RNA, 19 nt, Artificial Sequence
  Description of Artificial Sequence: Synthetic oligonucleotide
ccagcguugggacgcgcaa

SEQ ID NO: 1738 - RNA, 19 nt, Artificial Sequence
  Description of Artificial Sequence: Synthetic oligonucleotide
cagcguugggacgcgcaaa

SEQ ID NO: 1739 - RNA, 19 nt, Artificial Sequence
  Description of Artificial Sequence: Synthetic oligonucleotide
agcguugggacgcgcaaau

SEQ ID NO: 1740 - RNA, 19 nt, Artificial Sequence
  Description of Artificial Sequence: Synthetic oligonucleotide
gcguugggacgcgcaaauc

SEQ ID NO: 1741 - RNA, 19 nt, Artificial Sequence
  Description of Artificial Sequence: Synthetic oligonucleotide
cguugggacgcgcaaaucc

SEQ ID NO: 1742 - RNA, 19 nt, Artificial Sequence
  Description of Artificial Sequence: Synthetic oligonucleotide
guugggacgcgcaaauccc

SEQ ID NO: 1743 - RNA, 19 nt, Artificial Sequence
  Description of Artificial Sequence: Synthetic oligonucleotide
uugggacgcgcaaaucccg

SEQ ID NO: 1744 - RNA, 19 nt, Artificial Sequence
  Description of Artificial Sequence: Synthetic oligonucleotide
ugggacgcgcaaaucccgc

SEQ ID NO: 1745 - RNA, 19 nt, Artificial Sequence
  Description of Artificial Sequence: Synthetic oligonucleotide
gggacgcgcaaaucccgca

SEQ ID NO: 1746 - RNA, 19 nt, Artificial Sequence
  Description of Artificial Sequence: Synthetic oligonucleotide
ggacgcgcaaaucccgcau

SEQ ID NO: 1747 - RNA, 19 nt, Artificial Sequence
  Description of Artificial Sequence: Synthetic oligonucleotide
gacgcgcaaaucccgcauc

SEQ ID NO: 1748 - RNA, 19 nt, Artificial Sequence
  Description of Artificial Sequence: Synthetic oligonucleotide
acgcgcaaaucccgcauca

SEQ ID NO: 1749 - RNA, 19 nt, Artificial Sequence
  Description of Artificial Sequence: Synthetic oligonucleotide
cgcgcaaaucccgcaucag

SEQ ID NO: 1750 - RNA, 19 nt, Artificial Sequence
  Description of Artificial Sequence: Synthetic oligonucleotide
gcgcaaaucccgcaucagc

SEQ ID NO: 1751 - RNA, 19 nt, Artificial Sequence
  Description of Artificial Sequence: Synthetic oligonucleotide
cgcaaaucccgcaucagca

SEQ ID NO: 1752 - RNA, 19 nt, Artificial Sequence
  Description of Artificial Sequence: Synthetic oligonucleotide
gcaaaucccgcaucagcac

SEQ ID NO: 1753 - RNA, 19 nt, Artificial Sequence
  Description of Artificial Sequence: Synthetic oligonucleotide
caaaucccgcaucagcacc

SEQ ID NO: 1754 - RNA, 19 nt, Artificial Sequence
  Description of Artificial Sequence: Synthetic oligonucleotide
aaaucccgcaucagcaccg

SEQ ID NO: 1755 - RNA, 19 nt, Artificial Sequence
  Description of Artificial Sequence: Synthetic oligonucleotide
aaucccgcaucagcaccga

SEQ ID NO: 1756 - RNA, 19 nt, Artificial Sequence
  Description of Artificial Sequence: Synthetic oligonucleotide
aucccgcaucagcaccgau

SEQ ID NO: 1757 - RNA, 19 nt, Artificial Sequence
  Description of Artificial Sequence: Synthetic oligonucleotide
ucccgcaucagcaccgauu

SEQ ID NO: 1758 - RNA, 19 nt, Artificial Sequence
  Description of Artificial Sequence: Synthetic oligonucleotide
cccgcaucagcaccgauuu

SEQ ID NO: 1759 - RNA, 19 nt, Artificial Sequence
  Description of Artificial Sequence: Synthetic oligonucleotide
ccgcaucagcaccgauuua

SEQ ID NO: 1760 - RNA, 19 nt, Artificial Sequence
  Description of Artificial Sequence: Synthetic oligonucleotide
cgcaucagcaccgauuuac

SEQ ID NO: 1761 - RNA, 19 nt, Artificial Sequence
  Description of Artificial Sequence: Synthetic oligonucleotide
gcaucagcaccgauuuacg

SEQ ID NO: 1762 - RNA, 19 nt, Artificial Sequence
  Description of Artificial Sequence: Synthetic oligonucleotide
caucagcaccgauuuacgc

SEQ ID NO: 1763 - RNA, 19 nt, Artificial Sequence
  Description of Artificial Sequence: Synthetic oligonucleotide
aucagcaccgauuuacgcc

SEQ ID NO: 1764 - RNA, 19 nt, Artificial Sequence
  Description of Artificial Sequence: Synthetic oligonucleotide
ucagcaccgauuuacgcca

SEQ ID NO: 1765 - RNA, 19 nt, Artificial Sequence
  Description of Artificial Sequence: Synthetic oligonucleotide
cagcaccgauuuacgccag

SEQ ID NO: 1766 - RNA, 19 nt, Artificial Sequence
  Description of Artificial Sequence: Synthetic oligonucleotide
agcaccgauuuacgccaga

SEQ ID NO: 1767 - RNA, 19 nt, Artificial Sequence
  Description of Artificial Sequence: Synthetic oligonucleotide
gcaccgauuuacgccagaa

SEQ ID NO: 1768 - RNA, 19 nt, Artificial Sequence
  Description of Artificial Sequence: Synthetic oligonucleotide
caccgauuuacgccagaaa

SEQ ID NO: 1769 - RNA, 19 nt, Artificial Sequence
  Description of Artificial Sequence: Synthetic oligonucleotide
accgauuuacgccagaaaa

SEQ ID NO: 1770 - RNA, 19 nt, Artificial Sequence
  Description of Artificial Sequence: Synthetic oligonucleotide
ccgauuuacgccagaaaaa

SEQ ID NO: 1771 - RNA, 19 nt, Artificial Sequence
  Description of Artificial Sequence: Synthetic oligonucleotide
cgauuuacgccagaaaaau

SEQ ID NO: 1772 - RNA, 19 nt, Artificial Sequence
  Description of Artificial Sequence: Synthetic oligonucleotide
gauuuacgccagaaaaaua

SEQ ID NO: 1773 - RNA, 19 nt, Artificial Sequence
  Description of Artificial Sequence: Synthetic oligonucleotide
auuuacgccagaaaaauac

SEQ ID NO: 1774 - RNA, 19 nt, Artificial Sequence
  Description of Artificial Sequence: Synthetic oligonucleotide
uuuacgccagaaaaauacg

SEQ ID NO: 1775 - RNA, 19 nt, Artificial Sequence
  Description of Artificial Sequence: Synthetic oligonucleotide
uuacgccagaaaaauacgc

SEQ ID NO: 1776 - RNA, 19 nt, Artificial Sequence
  Description of Artificial Sequence: Synthetic oligonucleotide
uacgccagaaaaauacgcg

SEQ ID NO: 1777 - RNA, 19 nt, Artificial Sequence
  Description of Artificial Sequence: Synthetic oligonucleotide
acgccagaaaaauacgcgu

SEQ ID NO: 1778 - RNA, 19 nt, Artificial Sequence
  Description of Artificial Sequence: Synthetic oligonucleotide
cgccagaaaaauacgcgug

SEQ ID NO: 1779 - RNA, 19 nt, Artificial Sequence
  Description of Artificial Sequence: Synthetic oligonucleotide
gccagaaaaauacgcgugc

SEQ ID NO: 1780 - RNA, 19 nt, Artificial Sequence
  Description of Artificial Sequence: Synthetic oligonucleotide
ccagaaaaauacgcgugca

SEQ ID NO: 1781 - RNA, 19 nt, Artificial Sequence
  Description of Artificial Sequence: Synthetic oligonucleotide
cagaaaaauacgcgugcaa

SEQ ID NO: 1782 - RNA, 19 nt, Artificial Sequence
  Description of Artificial Sequence: Synthetic oligonucleotide
agaaaaauacgcgugcaaa

SEQ ID NO: 1783 - RNA, 19 nt, Artificial Sequence
  Description of Artificial Sequence: Synthetic oligonucleotide
gaaaaauacgcgugcaaag

SEQ ID NO: 1784 - RNA, 19 nt, Artificial Sequence
  Description of Artificial Sequence: Synthetic oligonucleotide
aaaaauacgcgugcaaaga

SEQ ID NO: 1785 - RNA, 19 nt, Artificial Sequence
  Description of Artificial Sequence: Synthetic oligonucleotide
aaaauacgcgugcaaagac

SEQ ID NO: 1786 - RNA, 19 nt, Artificial Sequence
  Description of Artificial Sequence: Synthetic oligonucleotide
aaauacgcgugcaaagacc

SEQ ID NO: 1787 - RNA, 19 nt, Artificial Sequence
  Description of Artificial Sequence: Synthetic oligonucleotide
aauacgcgugcaaagaccu

SEQ ID NO: 1788 - RNA, 19 nt, Artificial Sequence
  Description of Artificial Sequence: Synthetic oligonucleotide
auacgcgugcaaagaccuu

SEQ ID NO: 1789 - RNA, 19 nt, Artificial Sequence
  Description of Artificial Sequence: Synthetic oligonucleotide
uacgcgugcaaagaccuuc

SEQ ID NO: 1790 - RNA, 19 nt, Artificial Sequence
  Description of Artificial Sequence: Synthetic oligonucleotide
acgcgugcaaagaccuucg

SEQ ID NO: 1791 - RNA, 19 nt, Artificial Sequence
  Description of Artificial Sequence: Synthetic oligonucleotide
cgcgugcaaagaccuucgg

SEQ ID NO: 1792 - RNA, 19 nt, Artificial Sequence
  Description of Artificial Sequence: Synthetic oligonucleotide
gcgugcaaagaccuucggg

SEQ ID NO: 1793 - RNA, 19 nt, Artificial Sequence
  Description of Artificial Sequence: Synthetic oligonucleotide
cgugcaaagaccuucggga

SEQ ID NO: 1794 - RNA, 19 nt, Artificial Sequence
  Description of Artificial Sequence: Synthetic oligonucleotide
gugcaaagaccuucgggag

SEQ ID NO: 1795 - RNA, 19 nt, Artificial Sequence
  Description of Artificial Sequence: Synthetic oligonucleotide
ugcaaagaccuucgggaga

SEQ ID NO: 1796 - RNA, 19 nt, Artificial Sequence
  Description of Artificial Sequence: Synthetic oligonucleotide
gcaaagaccuucgggagaa

SEQ ID NO: 1797 - RNA, 19 nt, Artificial Sequence
  Description of Artificial Sequence: Synthetic oligonucleotide
caaagaccuucgggagaac

SEQ ID NO: 1798 - RNA, 19 nt, Artificial Sequence
  Description of Artificial Sequence: Synthetic oligonucleotide
aaagaccuucgggagaacu

SEQ ID NO: 1799 - RNA, 19 nt, Artificial Sequence
  Description of Artificial Sequence: Synthetic oligonucleotide
aagaccuucgggagaacuu

SEQ ID NO: 1800 - RNA, 19 nt, Artificial Sequence
  Description of Artificial Sequence: Synthetic oligonucleotide
agaccuucgggagaacuuc

SEQ ID NO: 1801 - RNA, 19 nt, Artificial Sequence
  Description of Artificial Sequence: Synthetic oligonucleotide
gaccuucgggagaacuucu

SEQ ID NO: 1802 - RNA, 19 nt, Artificial Sequence
  Description of Artificial Sequence: Synthetic oligonucleotide
accuucgggagaacuucug

SEQ ID NO: 1803 - RNA, 19 nt, Artificial Sequence
  Description of Artificial Sequence: Synthetic oligonucleotide
ccuucgggagaacuucugc

SEQ ID NO: 1804 - RNA, 19 nt, Artificial Sequence
  Description of Artificial Sequence: Synthetic oligonucleotide
cuucgggagaacuucugcc

SEQ ID NO: 1805 - RNA, 19 nt, Artificial Sequence
  Description of Artificial Sequence: Synthetic oligonucleotide
uucgggagaacuucugccg

SEQ ID NO: 1806 - RNA, 19 nt, Artificial Sequence
  Description of Artificial Sequence: Synthetic oligonucleotide
ucgggagaacuucugccgg

SEQ ID NO: 1807 - RNA, 19 nt, Artificial Sequence
  Description of Artificial Sequence: Synthetic oligonucleotide
cgggagaacuucugccgga

SEQ ID NO: 1808 - RNA, 19 nt, Artificial Sequence
  Description of Artificial Sequence: Synthetic oligonucleotide
gggagaacuucugccggaa

SEQ ID NO: 1809 - RNA, 19 nt, Artificial Sequence
  Description of Artificial Sequence: Synthetic oligonucleotide
ggagaacuucugccggaac

SEQ ID NO: 1810 - RNA, 19 nt, Artificial Sequence
  Description of Artificial Sequence: Synthetic oligonucleotide
gagaacuucugccggaacc

SEQ ID NO: 1811 - RNA, 19 nt, Artificial Sequence
  Description of Artificial Sequence: Synthetic oligonucleotide
agaacuucugccggaaccc

SEQ ID NO: 1812 - RNA, 19 nt, Artificial Sequence
  Description of Artificial Sequence: Synthetic oligonucleotide
gaacuucugccggaacccc

SEQ ID NO: 1813 - RNA, 19 nt, Artificial Sequence
  Description of Artificial Sequence: Synthetic oligonucleotide
aacuucugccggaaccccg

SEQ ID NO: 1814 - RNA, 19 nt, Artificial Sequence
  Description of Artificial Sequence: Synthetic oligonucleotide
acuucugccggaaccccga

SEQ ID NO: 1815 - RNA, 19 nt, Artificial Sequence
  Description of Artificial Sequence: Synthetic oligonucleotide
cuucugccggaaccccgac

SEQ ID NO: 1816 - RNA, 19 nt, Artificial Sequence
  Description of Artificial Sequence: Synthetic oligonucleotide
uucugccggaaccccgacg

SEQ ID NO: 1817 - RNA, 19 nt, Artificial Sequence
  Description of Artificial Sequence: Synthetic oligonucleotide
ucugccggaaccccgacgg

SEQ ID NO: 1818 - RNA, 19 nt, Artificial Sequence
  Description of Artificial Sequence: Synthetic oligonucleotide
cugccggaaccccgacggc

SEQ ID NO: 1819 - RNA, 19 nt, Artificial Sequence
  Description of Artificial Sequence: Synthetic oligonucleotide
ugccggaaccccgacggcu

SEQ ID NO: 1820 - RNA, 19 nt, Artificial Sequence
  Description of Artificial Sequence: Synthetic oligonucleotide
gccggaaccccgacggcuc

SEQ ID NO: 1821 - RNA, 19 nt, Artificial Sequence
  Description of Artificial Sequence: Synthetic oligonucleotide
ccggaaccccgacggcuca

SEQ ID NO: 1822 - RNA, 19 nt, Artificial Sequence
  Description of Artificial Sequence: Synthetic oligonucleotide
cggaaccccgacggcucag

SEQ ID NO: 1823 - RNA, 19 nt, Artificial Sequence
  Description of Artificial Sequence: Synthetic oligonucleotide
ggaaccccgacggcucaga

SEQ ID NO: 1824 - RNA, 19 nt, Artificial Sequence
  Description of Artificial Sequence: Synthetic oligonucleotide
gaaccccgacggcucagag

SEQ ID NO: 1825 - RNA, 19 nt, Artificial Sequence
  Description of Artificial Sequence: Synthetic oligonucleotide
aaccccgacggcucagagg

SEQ ID NO: 1826 - RNA, 19 nt, Artificial Sequence
  Description of Artificial Sequence: Synthetic oligonucleotide
accccgacggcucagaggc

SEQ ID NO: 1827 - RNA, 19 nt, Artificial Sequence
  Description of Artificial Sequence: Synthetic oligonucleotide
ccccgacggcucagaggcg

SEQ ID NO: 1828 - RNA, 19 nt, Artificial Sequence
  Description of Artificial Sequence: Synthetic oligonucleotide
cccgacggcucagaggcgc

SEQ ID NO: 1829 - RNA, 19 nt, Artificial Sequence
  Description of Artificial Sequence: Synthetic oligonucleotide
ccgacggcucagaggcgcc

SEQ ID NO: 1830 - RNA, 19 nt, Artificial Sequence
  Description of Artificial Sequence: Synthetic oligonucleotide
cgacggcucagaggcgccc

SEQ ID NO: 1831 - RNA, 19 nt, Artificial Sequence
  Description of Artificial Sequence: Synthetic oligonucleotide
gacggcucagaggcgcccu

SEQ ID NO: 1832 - RNA, 19 nt, Artificial Sequence
  Description of Artificial Sequence: Synthetic oligonucleotide
acggcucagaggcgcccug

SEQ ID NO: 1833 - RNA, 19 nt, Artificial Sequence
  Description of Artificial Sequence: Synthetic oligonucleotide
cggcucagaggcgcccugg

SEQ ID NO: 1834 - RNA, 19 nt, Artificial Sequence
  Description of Artificial Sequence: Synthetic oligonucleotide
ggcucagaggcgcccuggu

SEQ ID NO: 1835 - RNA, 19 nt, Artificial Sequence
  Description of Artificial Sequence: Synthetic oligonucleotide
gcucagaggcgcccuggug

SEQ ID NO: 1836 - RNA, 19 nt, Artificial Sequence
  Description of Artificial Sequence: Synthetic oligonucleotide
cucagaggcgcccuggugc

SEQ ID NO: 1837 - RNA, 19 nt, Artificial Sequence
  Description of Artificial Sequence: Synthetic oligonucleotide
ucagaggcgcccuggugcu

SEQ ID NO: 1838 - RNA, 19 nt, Artificial Sequence
  Description of Artificial Sequence: Synthetic oligonucleotide
cagaggcgcccuggugcuu

SEQ ID NO: 1839 - RNA, 19 nt, Artificial Sequence
  Description of Artificial Sequence: Synthetic oligonucleotide
agaggcgcccuggugcuuc

SEQ ID NO: 1840 - RNA, 19 nt, Artificial Sequence
  Description of Artificial Sequence: Synthetic oligonucleotide
gaggcgcccuggugcuuca

SEQ ID NO: 1841 - RNA, 19 nt, Artificial Sequence
  Description of Artificial Sequence: Synthetic oligonucleotide
aggcgcccuggugcuucac

SEQ ID NO: 1842 - RNA, 19 nt, Artificial Sequence
  Description of Artificial Sequence: Synthetic oligonucleotide
ggcgcccuggugcuucaca

SEQ ID NO: 1843 - RNA, 19 nt, Artificial Sequence
  Description of Artificial Sequence: Synthetic oligonucleotide
gcgcccuggugcuucacac

SEQ ID NO: 1844 - RNA, 19 nt, Artificial Sequence
  Description of Artificial Sequence: Synthetic oligonucleotide
cgcccuggugcuucacacu

SEQ ID NO: 1845 - RNA, 19 nt, Artificial Sequence
  Description of Artificial Sequence: Synthetic oligonucleotide
gcccuggugcuucacacug

SEQ ID NO: 1846 - RNA, 19 nt, Artificial Sequence
  Description of Artificial Sequence: Synthetic oligonucleotide
cccuggugcuucacacugc

SEQ ID NO: 1847 - RNA, 19 nt, Artificial Sequence
  Description of Artificial Sequence: Synthetic oligonucleotide
ccuggugcuucacacugcg

SEQ ID NO: 1848 - RNA, 19 nt, Artificial Sequence
  Description of Artificial Sequence: Synthetic oligonucleotide
cuggugcuucacacugcgg

SEQ ID NO: 1849 - RNA, 19 nt, Artificial Sequence
  Description of Artificial Sequence: Synthetic oligonucleotide
uggugcuucacacugcggc

SEQ ID NO: 1850 - RNA, 19 nt, Artificial Sequence
  Description of Artificial Sequence: Synthetic oligonucleotide
ggugcuucacacugcggcc

SEQ ID NO: 1851 - RNA, 19 nt, Artificial Sequence
  Description of Artificial Sequence: Synthetic oligonucleotide
gugcuucacacugcggccc

SEQ ID NO: 1852 - RNA, 19 nt, Artificial Sequence
  Description of Artificial Sequence: Synthetic oligonucleotide
ugcuucacacugcggcccg

SEQ ID NO: 1853 - RNA, 19 nt, Artificial Sequence
  Description of Artificial Sequence: Synthetic oligonucleotide
gcuucacacugcggcccgg

SEQ ID NO: 1854 - RNA, 19 nt, Artificial Sequence
  Description of Artificial Sequence: Synthetic oligonucleotide
cuucacacugcggcccggc

SEQ ID NO: 1855 - RNA, 19 nt, Artificial Sequence
  Description of Artificial Sequence: Synthetic oligonucleotide
uucacacugcggcccggca

SEQ ID NO: 1856 - RNA, 19 nt, Artificial Sequence
  Description of Artificial Sequence: Synthetic oligonucleotide
ucacacugcggcccggcau

SEQ ID NO: 1857 - RNA, 19 nt, Artificial Sequence
  Description of Artificial Sequence: Synthetic oligonucleotide
cacacugcggcccggcaug

SEQ ID NO: 1858 - RNA, 19 nt, Artificial Sequence
  Description of Artificial Sequence: Synthetic oligonucleotide
acacugcggcccggcaugc

SEQ ID NO: 1859 - RNA, 19 nt, Artificial Sequence
  Description of Artificial Sequence: Synthetic oligonucleotide
cacugcggcccggcaugcg

SEQ ID NO: 1860 - RNA, 19 nt, Artificial Sequence
  Description of Artificial Sequence: Synthetic oligonucleotide
acugcggcccggcaugcgc

SEQ ID NO: 1861 - RNA, 19 nt, Artificial Sequence
  Description of Artificial Sequence: Synthetic oligonucleotide
cugcggcccggcaugcgcg

SEQ ID NO: 1862 - RNA, 19 nt, Artificial Sequence
  Description of Artificial Sequence: Synthetic oligonucleotide
ugcggcccggcaugcgcgc

SEQ ID NO: 1863 - RNA, 19 nt, Artificial Sequence
  Description of Artificial Sequence: Synthetic oligonucleotide
gcggcccggcaugcgcgcg

SEQ ID NO: 1864 - RNA, 19 nt, Artificial Sequence
  Description of Artificial Sequence: Synthetic oligonucleotide
cggcccggcaugcgcgcgg

SEQ ID NO: 1865 - RNA, 19 nt, Artificial Sequence
  Description of Artificial Sequence: Synthetic oligonucleotide
ggcccggcaugcgcgcggc

SEQ ID NO: 1866 - RNA, 19 nt, Artificial Sequence
  Description of Artificial Sequence: Synthetic oligonucleotide
gcccggcaugcgcgcggcc

SEQ ID NO: 1867 - RNA, 19 nt, Artificial Sequence
  Description of Artificial Sequence: Synthetic oligonucleotide
cccggcaugcgcgcggccu

SEQ ID NO: 1868 - RNA, 19 nt, Artificial Sequence
  Description of Artificial Sequence: Synthetic oligonucleotide
ccggcaugcgcgcggccuu

SEQ ID NO: 1869 - RNA, 19 nt, Artificial Sequence
  Description of Artificial Sequence: Synthetic oligonucleotide
cggcaugcgcgcggccuuu

SEQ ID NO: 1870 - RNA, 19 nt, Artificial Sequence
  Description of Artificial Sequence: Synthetic oligonucleotide
ggcaugcgcgcggccuuuu

SEQ ID NO: 1871 - RNA, 19 nt, Artificial Sequence
  Description of Artificial Sequence: Synthetic oligonucleotide
gcaugcgcgcggccuuuug

SEQ ID NO: 1872 - RNA, 19 nt, Artificial Sequence
  Description of Artificial Sequence: Synthetic oligonucleotide
caugcgcgcggccuuuugc

SEQ ID NO: 1873 - RNA, 19 nt, Artificial Sequence
  Description of Artificial Sequence: Synthetic oligonucleotide
augcgcgcggccuuuugcu

SEQ ID NO: 1874 - RNA, 19 nt, Artificial Sequence
  Description of Artificial Sequence: Synthetic oligonucleotide
ugcgcgcggccuuuugcua

SEQ ID NO: 1875 - RNA, 19 nt, Artificial Sequence
  Description of Artificial Sequence: Synthetic oligonucleotide
gcgcgcggccuuuugcuac

SEQ ID NO: 1876 - RNA, 19 nt, Artificial Sequence
  Description of Artificial Sequence: Synthetic oligonucleotide
cgcgcggccuuuugcuacc

SEQ ID NO: 1877 - RNA, 19 nt, Artificial Sequence
  Description of Artificial Sequence: Synthetic oligonucleotide
gcgcggccuuuugcuacca

SEQ ID NO: 1878 - RNA, 19 nt, Artificial Sequence
  Description of Artificial Sequence: Synthetic oligonucleotide
cgcggccuuuugcuaccag

SEQ ID NO: 1879 - RNA, 19 nt, Artificial Sequence
  Description of Artificial Sequence: Synthetic oligonucleotide
gcggccuuuugcuaccaga

SEQ ID NO: 1880 - RNA, 19 nt, Artificial Sequence
  Description of Artificial Sequence: Synthetic oligonucleotide
cggccuuuugcuaccagau

SEQ ID NO: 1881 - RNA, 19 nt, Artificial Sequence
  Description of Artificial Sequence: Synthetic oligonucleotide
ggccuuuugcuaccagauc

SEQ ID NO: 1882 - RNA, 19 nt, Artificial Sequence
  Description of Artificial Sequence: Synthetic oligonucleotide
gccuuuugcuaccagaucc

SEQ ID NO: 1883 - RNA, 19 nt, Artificial Sequence
  Description of Artificial Sequence: Synthetic oligonucleotide
ccuuuugcuaccagauccg

SEQ ID NO: 1884 - RNA, 19 nt, Artificial Sequence
  Description of Artificial Sequence: Synthetic oligonucleotide
cuuuugcuaccagauccgg

SEQ ID NO: 1885 - RNA, 19 nt, Artificial Sequence
  Description of Artificial Sequence: Synthetic oligonucleotide
uuuugcuaccagauccggc

SEQ ID NO: 1886 - RNA, 19 nt, Artificial Sequence
  Description of Artificial Sequence: Synthetic oligonucleotide
uuugcuaccagauccggcg

SEQ ID NO: 1887 - RNA, 19 nt, Artificial Sequence
  Description of Artificial Sequence: Synthetic oligonucleotide
uugcuaccagauccggcgu

SEQ ID NO: 1888 - RNA, 19 nt, Artificial Sequence
  Description of Artificial Sequence: Synthetic oligonucleotide
ugcuaccagauccggcguu

SEQ ID NO: 1889 - RNA, 19 nt, Artificial Sequence
  Description of Artificial Sequence: Synthetic oligonucleotide
gcuaccagauccggcguug

SEQ ID NO: 1890 - RNA, 19 nt, Artificial Sequence
  Description of Artificial Sequence: Synthetic oligonucleotide
cuaccagauccggcguugu

SEQ ID NO: 1891 - RNA, 19 nt, Artificial Sequence
  Description of Artificial Sequence: Synthetic oligonucleotide
uaccagauccggcguugua

SEQ ID NO: 1892 - RNA, 19 nt, Artificial Sequence
  Description of Artificial Sequence: Synthetic oligonucleotide
accagauccggcguuguac

SEQ ID NO: 1893 - RNA, 19 nt, Artificial Sequence
  Description of Artificial Sequence: Synthetic oligonucleotide
ccagauccggcguuguaca

SEQ ID NO: 1894 - RNA, 19 nt, Artificial Sequence
  Description of Artificial Sequence: Synthetic oligonucleotide
cagauccggcguuguacag

SEQ ID NO: 1895 - RNA, 19 nt, Artificial Sequence
  Description of Artificial Sequence: Synthetic oligonucleotide
agauccggcguuguacaga

SEQ ID NO: 1896 - RNA, 19 nt, Artificial Sequence
  Description of Artificial Sequence: Synthetic oligonucleotide
gauccggcguuguacagac

SEQ ID NO: 1897 - RNA, 19 nt, Artificial Sequence
  Description of Artificial Sequence: Synthetic oligonucleotide
auccggcguuguacagacg

SEQ ID NO: 1898 - RNA, 19 nt, Artificial Sequence
  Description of Artificial Sequence: Synthetic oligonucleotide
uccggcguuguacagacga

SEQ ID NO: 1899 - RNA, 19 nt, Artificial Sequence
  Description of Artificial Sequence: Synthetic oligonucleotide
ccggcguuguacagacgac

SEQ ID NO: 1900 - RNA, 19 nt, Artificial Sequence
  Description of Artificial Sequence: Synthetic oligonucleotide
cggcguuguacagacgacg

SEQ ID NO: 1901 - RNA, 19 nt, Artificial Sequence
  Description of Artificial Sequence: Synthetic oligonucleotide
ggcguuguacagacgacgu

SEQ ID NO: 1902 - RNA, 19 nt, Artificial Sequence
  Description of Artificial Sequence: Synthetic oligonucleotide
gcguuguacagacgacgug

SEQ ID NO: 1903 - RNA, 19 nt, Artificial Sequence
  Description of Artificial Sequence: Synthetic oligonucleotide
cguuguacagacgacgugc

SEQ ID NO: 1904 - RNA, 19 nt, Artificial Sequence
  Description of Artificial Sequence: Synthetic oligonucleotide
guuguacagacgacgugcg

SEQ ID NO: 1905 - RNA, 19 nt, Artificial Sequence
  Description of Artificial Sequence: Synthetic oligonucleotide
uuguacagacgacgugcgg

SEQ ID NO: 1906 - RNA, 19 nt, Artificial Sequence
  Description of Artificial Sequence: Synthetic oligonucleotide
uguacagacgacgugcggc

SEQ ID NO: 1907 - RNA, 19 nt, Artificial Sequence
  Description of Artificial Sequence: Synthetic oligonucleotide
guacagacgacgugcggcc

SEQ ID NO: 1908 - RNA, 19 nt, Artificial Sequence
  Description of Artificial Sequence: Synthetic oligonucleotide
uacagacgacgugcggccc

SEQ ID NO: 1909 - RNA, 19 nt, Artificial Sequence
  Description of Artificial Sequence: Synthetic oligonucleotide
acagacgacgugcggcccc

SEQ ID NO: 1910 - RNA, 19 nt, Artificial Sequence
  Description of Artificial Sequence: Synthetic oligonucleotide
cagacgacgugcggcccca

SEQ ID NO: 1911 - RNA, 19 nt, Artificial Sequence
  Description of Artificial Sequence: Synthetic oligonucleotide
agacgacgugcggccccag

SEQ ID NO: 1912 - RNA, 19 nt, Artificial Sequence
  Description of Artificial Sequence: Synthetic oligonucleotide
gacgacgugcggccccagg

SEQ ID NO: 1913 - RNA, 19 nt, Artificial Sequence
  Description of Artificial Sequence: Synthetic oligonucleotide
acgacgugcggccccagga

SEQ ID NO: 1914 - RNA, 19 nt, Artificial Sequence
  Description of Artificial Sequence: Synthetic oligonucleotide
cgacgugcggccccaggac

SEQ ID NO: 1915 - RNA, 19 nt, Artificial Sequence
  Description of Artificial Sequence: Synthetic oligonucleotide
gacgugcggccccaggacu

SEQ ID NO: 1916 - RNA, 19 nt, Artificial Sequence
  Description of Artificial Sequence: Synthetic oligonucleotide
acgugcggccccaggacug

SEQ ID NO: 1917 - RNA, 19 nt, Artificial Sequence
  Description of Artificial Sequence: Synthetic oligonucleotide
cgugcggccccaggacugc

SEQ ID NO: 1918 - RNA, 19 nt, Artificial Sequence
  Description of Artificial Sequence: Synthetic oligonucleotide
gugcggccccaggacugcu

SEQ ID NO: 1919 - RNA, 19 nt, Artificial Sequence
  Description of Artificial Sequence: Synthetic oligonucleotide
ugcggccccaggacugcua

SEQ ID NO: 1920 - RNA, 19 nt, Artificial Sequence
  Description of Artificial Sequence: Synthetic oligonucleotide
gcggccccaggacugcuac

SEQ ID NO: 1921 - RNA, 19 nt, Artificial Sequence
  Description of Artificial Sequence: Synthetic oligonucleotide
cggccccaggacugcuacc

SEQ ID NO: 1922 - RNA, 19 nt, Artificial Sequence
  Description of Artificial Sequence: Synthetic oligonucleotide
ggccccaggacugcuacca

SEQ ID NO: 1923 - RNA, 19 nt, Artificial Sequence
  Description of Artificial Sequence: Synthetic oligonucleotide
gccccaggacugcuaccac

SEQ ID NO: 1924 - RNA, 19 nt, Artificial Sequence
  Description of Artificial Sequence: Synthetic oligonucleotide
ccccaggacugcuaccacg

SEQ ID NO: 1925 - RNA, 19 nt, Artificial Sequence
  Description of Artificial Sequence: Synthetic oligonucleotide
cccaggacugcuaccacgg

SEQ ID NO: 1926 - RNA, 19 nt, Artificial Sequence
  Description of Artificial Sequence: Synthetic oligonucleotide
ccaggacugcuaccacggc

SEQ ID NO: 1927 - RNA, 19 nt, Artificial Sequence
  Description of Artificial Sequence: Synthetic oligonucleotide
caggacugcuaccacggcg

SEQ ID NO: 1928 - RNA, 19 nt, Artificial Sequence
  Description of Artificial Sequence: Synthetic oligonucleotide
aggacugcuaccacggcgc

SEQ ID NO: 1929 - RNA, 19 nt, Artificial Sequence
  Description of Artificial Sequence: Synthetic oligonucleotide
ggacugcuaccacggcgca

SEQ ID NO: 1930 - RNA, 19 nt, Artificial Sequence
  Description of Artificial Sequence: Synthetic oligonucleotide
gacugcuaccacggcgcag

SEQ ID NO: 1931 - RNA, 19 nt, Artificial Sequence
  Description of Artificial Sequence: Synthetic oligonucleotide
acugcuaccacggcgcagg

SEQ ID NO: 1932 - RNA, 19 nt, Artificial Sequence
  Description of Artificial Sequence: Synthetic oligonucleotide
cugcuaccacggcgcaggg

SEQ ID NO: 1933 - RNA, 19 nt, Artificial Sequence
  Description of Artificial Sequence: Synthetic oligonucleotide
ugcuaccacggcgcagggg

SEQ ID NO: 1934 - RNA, 19 nt, Artificial Sequence
  Description of Artificial Sequence: Synthetic oligonucleotide
gcuaccacggcgcagggga

SEQ ID NO: 1935 - RNA, 19 nt, Artificial Sequence
  Description of Artificial Sequence: Synthetic oligonucleotide
cuaccacggcgcaggggag

SEQ ID NO: 1936 - RNA, 19 nt, Artificial Sequence
  Description of Artificial Sequence: Synthetic oligonucleotide
uaccacggcgcaggggagc

SEQ ID NO: 1937 - RNA, 19 nt, Artificial Sequence
  Description of Artificial Sequence: Synthetic oligonucleotide
accacggcgcaggggagca

SEQ ID NO: 1938 - RNA, 19 nt, Artificial Sequence
  Description of Artificial Sequence: Synthetic oligonucleotide
ccacggcgcaggggagcag

SEQ ID NO: 1939 - RNA, 19 nt, Artificial Sequence
  Description of Artificial Sequence: Synthetic oligonucleotide
cacggcgcaggggagcagu

SEQ ID NO: 1940 - RNA, 19 nt, Artificial Sequence
  Description of Artificial Sequence: Synthetic oligonucleotide
acggcgcaggggagcagua

SEQ ID NO: 1941 - RNA, 19 nt, Artificial Sequence
  Description of Artificial Sequence: Synthetic oligonucleotide
cggcgcaggggagcaguac

SEQ ID NO: 1942 - RNA, 19 nt, Artificial Sequence
  Description of Artificial Sequence: Synthetic oligonucleotide
ggcgcaggggagcaguacc

SEQ ID NO: 1943 - RNA, 19 nt, Artificial Sequence
  Description of Artificial Sequence: Synthetic oligonucleotide
gcgcaggggagcaguaccg

SEQ ID NO: 1944 - RNA, 19 nt, Artificial Sequence
  Description of Artificial Sequence: Synthetic oligonucleotide
cgcaggggagcaguaccgc

SEQ ID NO: 1945 - RNA, 19 nt, Artificial Sequence
  Description of Artificial Sequence: Synthetic oligonucleotide
gcaggggagcaguaccgcg

SEQ ID NO: 1946 - RNA, 19 nt, Artificial Sequence
  Description of Artificial Sequence: Synthetic oligonucleotide
caggggagcaguaccgcgg

SEQ ID NO: 1947 - RNA, 19 nt, Artificial Sequence
  Description of Artificial Sequence: Synthetic oligonucleotide
aggggagcaguaccgcggc

SEQ ID NO: 1948 - RNA, 19 nt, Artificial Sequence
  Description of Artificial Sequence: Synthetic oligonucleotide
ggggagcaguaccgcggca

SEQ ID NO: 1949 - RNA, 19 nt, Artificial Sequence
  Description of Artificial Sequence: Synthetic oligonucleotide
gggagcaguaccgcggcac

SEQ ID NO: 1950 - RNA, 19 nt, Artificial Sequence
  Description of Artificial Sequence: Synthetic oligonucleotide
ggagcaguaccgcggcacg

SEQ ID NO: 1951 - RNA, 19 nt, Artificial Sequence
  Description of Artificial Sequence: Synthetic oligonucleotide
gagcaguaccgcggcacgg

SEQ ID NO: 1952 - RNA, 19 nt, Artificial Sequence
  Description of Artificial Sequence: Synthetic oligonucleotide
agcaguaccgcggcacggu

SEQ ID NO: 1953 - RNA, 19 nt, Artificial Sequence
  Description of Artificial Sequence: Synthetic oligonucleotide
gcaguaccgcggcacgguc

SEQ ID NO: 1954 - RNA, 19 nt, Artificial Sequence
  Description of Artificial Sequence: Synthetic oligonucleotide
caguaccgcggcacgguca

SEQ ID NO: 1955 - RNA, 19 nt, Artificial Sequence
  Description of Artificial Sequence: Synthetic oligonucleotide
aguaccgcggcacggucag

SEQ ID NO: 1956 - RNA, 19 nt, Artificial Sequence
  Description of Artificial Sequence: Synthetic oligonucleotide
guaccgcggcacggucagc

SEQ ID NO: 1957 - RNA, 19 nt, Artificial Sequence
  Description of Artificial Sequence: Synthetic oligonucleotide
uaccgcggcacggucagca

SEQ ID NO: 1958 - RNA, 19 nt, Artificial Sequence
  Description of Artificial Sequence: Synthetic oligonucleotide
accgcggcacggucagcaa

SEQ ID NO: 1959 - RNA, 19 nt, Artificial Sequence
  Description of Artificial Sequence: Synthetic oligonucleotide
ccgcggcacggucagcaag

SEQ ID NO: 1960 - RNA, 19 nt, Artificial Sequence
  Description of Artificial Sequence: Synthetic oligonucleotide
cgcggcacggucagcaaga

SEQ ID NO: 1961 - RNA, 19 nt, Artificial Sequence
  Description of Artificial Sequence: Synthetic oligonucleotide
gcggcacggucagcaagac

SEQ ID NO: 1962 - RNA, 19 nt, Artificial Sequence
  Description of Artificial Sequence: Synthetic oligonucleotide
cggcacggucagcaagacc

SEQ ID NO: 1963 - RNA, 19 nt, Artificial Sequence
  Description of Artificial Sequence: Synthetic oligonucleotide
ggcacggucagcaagaccc

SEQ ID NO: 1964 - RNA, 19 nt, Artificial Sequence
  Description of Artificial Sequence: Synthetic oligonucleotide
gcacggucagcaagacccg

SEQ ID NO: 1965 - RNA, 19 nt, Artificial Sequence
  Description of Artificial Sequence: Synthetic oligonucleotide
cacggucagcaagacccgc

SEQ ID NO: 1966 - RNA, 19 nt, Artificial Sequence
  Description of Artificial Sequence: Synthetic oligonucleotide
acggucagcaagacccgca

SEQ ID NO: 1967 - RNA, 19 nt, Artificial Sequence
  Description of Artificial Sequence: Synthetic oligonucleotide
cggucagcaagacccgcaa

SEQ ID NO: 1968 - RNA, 19 nt, Artificial Sequence
  Description of Artificial Sequence: Synthetic oligonucleotide
ggucagcaagacccgcaag

SEQ ID NO: 1969 - RNA, 19 nt, Artificial Sequence
  Description of Artificial Sequence: Synthetic oligonucleotide
gucagcaagacccgcaagg

SEQ ID NO: 1970 - RNA, 19 nt, Artificial Sequence
  Description of Artificial Sequence: Synthetic oligonucleotide
ucagcaagacccgcaaggg

SEQ ID NO: 1971 - RNA, 19 nt, Artificial Sequence
  Description of Artificial Sequence: Synthetic oligonucleotide
cagcaagacccgcaagggu

SEQ ID NO: 1972 - RNA, 19 nt, Artificial Sequence
  Description of Artificial Sequence: Synthetic oligonucleotide
agcaagacccgcaagggug

SEQ ID NO: 1973 - RNA, 19 nt, Artificial Sequence
  Description of Artificial Sequence: Synthetic oligonucleotide
gcaagacccgcaagggugu

SEQ ID NO: 1974 - RNA, 19 nt, Artificial Sequence
  Description of Artificial Sequence: Synthetic oligonucleotide
caagacccgcaaggguguc

SEQ ID NO: 1975 - RNA, 19 nt, Artificial Sequence
  Description of Artificial Sequence: Synthetic oligonucleotide
aagacccgcaagggugucc

SEQ ID NO: 1976 - RNA, 19 nt, Artificial Sequence
  Description of Artificial Sequence: Synthetic oligonucleotide
agacccgcaagggugucca

SEQ ID NO: 1977 - RNA, 19 nt, Artificial Sequence
  Description of Artificial Sequence: Synthetic oligonucleotide
gacccgcaaggguguccag

SEQ ID NO: 1978 - RNA, 19 nt, Artificial Sequence
  Description of Artificial Sequence: Synthetic oligonucleotide
acccgcaaggguguccagu

SEQ ID NO: 1979 - RNA, 19 nt, Artificial Sequence
  Description of Artificial Sequence: Synthetic oligonucleotide
cccgcaaggguguccagug

SEQ ID NO: 1980 - RNA, 19 nt, Artificial Sequence
  Description of Artificial Sequence: Synthetic oligonucleotide
ccgcaaggguguccagugc

SEQ ID NO: 1981 - RNA, 19 nt, Artificial Sequence
  Description of Artificial Sequence: Synthetic oligonucleotide
cgcaaggguguccagugcc

SEQ ID NO: 1982 - RNA, 19 nt, Artificial Sequence
  Description of Artificial Sequence: Synthetic oligonucleotide
gcaaggguguccagugcca

SEQ ID NO: 1983 - RNA, 19 nt, Artificial Sequence
  Description of Artificial Sequence: Synthetic oligonucleotide
caaggguguccagugccag

SEQ ID NO: 1984 - RNA, 19 nt, Artificial Sequence
  Description of Artificial Sequence: Synthetic oligonucleotide
aaggguguccagugccagc

SEQ ID NO: 1985 - RNA, 19 nt, Artificial Sequence
  Description of Artificial Sequence: Synthetic oligonucleotide
aggguguccagugccagcg

SEQ ID NO: 1986 - RNA, 19 nt, Artificial Sequence
  Description of Artificial Sequence: Synthetic oligonucleotide
ggguguccagugccagcgc

SEQ ID NO: 1987 - RNA, 19 nt, Artificial Sequence
  Description of Artificial Sequence: Synthetic oligonucleotide
gguguccagugccagcgcu

SEQ ID NO: 1988 - RNA, 19 nt, Artificial Sequence
  Description of Artificial Sequence: Synthetic oligonucleotide
guguccagugccagcgcug

SEQ ID NO: 1989 - RNA, 19 nt, Artificial Sequence
  Description of Artificial Sequence: Synthetic oligonucleotide
uguccagugccagcgcugg

SEQ ID NO: 1990 - RNA, 19 nt, Artificial Sequence
  Description of Artificial Sequence: Synthetic oligonucleotide
guccagugccagcgcuggu

SEQ ID NO: 1991 - RNA, 19 nt, Artificial Sequence
  Description of Artificial Sequence: Synthetic oligonucleotide
uccagugccagcgcugguc

SEQ ID NO: 1992 - RNA, 19 nt, Artificial Sequence
  Description of Artificial Sequence: Synthetic oligonucleotide
ccagugccagcgcuggucc

SEQ ID NO: 1993 - RNA, 19 nt, Artificial Sequence
  Description of Artificial Sequence: Synthetic oligonucleotide
cagugccagcgcugguccg

SEQ ID NO: 1994 - RNA, 19 nt, Artificial Sequence
  Description of Artificial Sequence: Synthetic oligonucleotide
agugccagcgcugguccgc

SEQ ID NO: 1995 - RNA, 19 nt, Artificial Sequence
  Description of Artificial Sequence: Synthetic oligonucleotide
gugccagcgcugguccgcu

SEQ ID NO: 1996 - RNA, 19 nt, Artificial Sequence
  Description of Artificial Sequence: Synthetic oligonucleotide
ugccagcgcugguccgcug

SEQ ID NO: 1997 - RNA, 19 nt, Artificial Sequence
  Description of Artificial Sequence: Synthetic oligonucleotide
gccagcgcugguccgcuga

SEQ ID NO: 1998 - RNA, 19 nt, Artificial Sequence
  Description of Artificial Sequence: Synthetic oligonucleotide
ccagcgcugguccgcugag

SEQ ID NO: 1999 - RNA, 19 nt, Artificial Sequence
  Description of Artificial Sequence: Synthetic oligonucleotide
cagcgcugguccgcugaga

SEQ ID NO: 2000 - RNA, 19 nt, Artificial Sequence
  Description of Artificial Sequence: Synthetic oligonucleotide
agcgcugguccgcugagac

SEQ ID NO: 2001 - RNA, 19 nt, Artificial Sequence
  Description of Artificial Sequence: Synthetic oligonucleotide
gcgcugguccgcugagacg

SEQ ID NO: 2002 - RNA, 19 nt, Artificial Sequence
  Description of Artificial Sequence: Synthetic oligonucleotide
cgcugguccgcugagacgc

SEQ ID NO: 2003 - RNA, 19 nt, Artificial Sequence
  Description of Artificial Sequence: Synthetic oligonucleotide
gcugguccgcugagacgcc

SEQ ID NO: 2004 - RNA, 19 nt, Artificial Sequence
  Description of Artificial Sequence: Synthetic oligonucleotide
cugguccgcugagacgccg

SEQ ID NO: 2005 - RNA, 19 nt, Artificial Sequence
  Description of Artificial Sequence: Synthetic oligonucleotide
ugguccgcugagacgccgc

SEQ ID NO: 2006 - RNA, 19 nt, Artificial Sequence
  Description of Artificial Sequence: Synthetic oligonucleotide
gguccgcugagacgccgca

SEQ ID NO: 2007 - RNA, 19 nt, Artificial Sequence
  Description of Artificial Sequence: Synthetic oligonucleotide
guccgcugagacgccgcac

SEQ ID NO: 2008 - RNA, 19 nt, Artificial Sequence
  Description of Artificial Sequence: Synthetic oligonucleotide
uccgcugagacgccgcaca

SEQ ID NO: 2009 - RNA, 19 nt, Artificial Sequence
  Description of Artificial Sequence: Synthetic oligonucleotide
ccgcugagacgccgcacaa

SEQ ID NO: 2010 - RNA, 19 nt, Artificial Sequence
  Description of Artificial Sequence: Synthetic oligonucleotide
cgcugagacgccgcacaag

SEQ ID NO: 2011 - RNA, 19 nt, Artificial Sequence
  Description of Artificial Sequence: Synthetic oligonucleotide
gcugagacgccgcacaagc

SEQ ID NO: 2012 - RNA, 19 nt, Artificial Sequence
  Description of Artificial Sequence: Synthetic oligonucleotide
cugagacgccgcacaagcc

SEQ ID NO: 2013 - RNA, 19 nt, Artificial Sequence
  Description of Artificial Sequence: Synthetic oligonucleotide
ugagacgccgcacaagccg

SEQ ID NO: 2014 - RNA, 19 nt, Artificial Sequence
  Description of Artificial Sequence: Synthetic oligonucleotide
gagacgccgcacaagccgc

SEQ ID NO: 2015 - RNA, 19 nt, Artificial Sequence
  Description of Artificial Sequence: Synthetic oligonucleotide
agacgccgcacaagccgca

SEQ ID NO: 2016 - RNA, 19 nt, Artificial Sequence
  Description of Artificial Sequence: Synthetic oligonucleotide
gacgccgcacaagccgcag

SEQ ID NO: 2017 - RNA, 19 nt, Artificial Sequence
  Description of Artificial Sequence: Synthetic oligonucleotide
acgccgcacaagccgcagu

SEQ ID NO: 2018 - RNA, 19 nt, Artificial Sequence
  Description of Artificial Sequence: Synthetic oligonucleotide
cgccgcacaagccgcaguu

SEQ ID NO: 2019 - RNA, 19 nt, Artificial Sequence
  Description of Artificial Sequence: Synthetic oligonucleotide
gccgcacaagccgcaguuc

SEQ ID NO: 2020 - RNA, 19 nt, Artificial Sequence
  Description of Artificial Sequence: Synthetic oligonucleotide
ccgcacaagccgcaguuca

SEQ ID NO: 2021 - RNA, 19 nt, Artificial Sequence
  Description of Artificial Sequence: Synthetic oligonucleotide
cgcacaagccgcaguucac

SEQ ID NO: 2022 - RNA, 19 nt, Artificial Sequence
  Description of Artificial Sequence: Synthetic oligonucleotide
gcacaagccgcaguucacg

SEQ ID NO: 2023 - RNA, 19 nt, Artificial Sequence
  Description of Artificial Sequence: Synthetic oligonucleotide
cacaagccgcaguucacgu

SEQ ID NO: 2024 - RNA, 19 nt, Artificial Sequence
  Description of Artificial Sequence: Synthetic oligonucleotide
acaagccgcaguucacguu

SEQ ID NO: 2025 - RNA, 19 nt, Artificial Sequence
  Description of Artificial Sequence: Synthetic oligonucleotide
caagccgcaguucacguuu

SEQ ID NO: 2026 - RNA, 19 nt, Artificial Sequence
  Description of Artificial Sequence: Synthetic oligonucleotide
aagccgcaguucacguuua

SEQ ID NO: 2027 - RNA, 19 nt, Artificial Sequence
  Description of Artificial Sequence: Synthetic oligonucleotide
agccgcaguucacguuuac

SEQ ID NO: 2028 - RNA, 19 nt, Artificial Sequence
  Description of Artificial Sequence: Synthetic oligonucleotide
gccgcaguucacguuuacc

SEQ ID NO: 2029 - RNA, 19 nt, Artificial Sequence
  Description of Artificial Sequence: Synthetic oligonucleotide
ccgcaguucacguuuaccu

SEQ ID NO: 2030 - RNA, 19 nt, Artificial Sequence
  Description of Artificial Sequence: Synthetic oligonucleotide
cgcaguucacguuuaccuc

SEQ ID NO: 2031 - RNA, 19 nt, Artificial Sequence
  Description of Artificial Sequence: Synthetic oligonucleotide
gcaguucacguuuaccucc

SEQ ID NO: 2032 - RNA, 19 nt, Artificial Sequence
  Description of Artificial Sequence: Synthetic oligonucleotide
caguucacguuuaccuccg

SEQ ID NO: 2033 - RNA, 19 nt, Artificial Sequence
  Description of Artificial Sequence: Synthetic oligonucleotide
aguucacguuuaccuccga

SEQ ID NO: 2034 - RNA, 19 nt, Artificial Sequence
  Description of Artificial Sequence: Synthetic oligonucleotide
guucacguuuaccuccgaa

SEQ ID NO: 2035 - RNA, 19 nt, Artificial Sequence
  Description of Artificial Sequence: Synthetic oligonucleotide
uucacguuuaccuccgaac

SEQ ID NO: 2036 - RNA, 19 nt, Artificial Sequence
  Description of Artificial Sequence: Synthetic oligonucleotide
ucacguuuaccuccgaacc

SEQ ID NO: 2037 - RNA, 19 nt, Artificial Sequence
  Description of Artificial Sequence: Synthetic oligonucleotide
cacguuuaccuccgaaccg

SEQ ID NO: 2038 - RNA, 19 nt, Artificial Sequence
  Description of Artificial Sequence: Synthetic oligonucleotide
acguuuaccuccgaaccgc

SEQ ID NO: 2039 - RNA, 19 nt, Artificial Sequence
  Description of Artificial Sequence: Synthetic oligonucleotide
cguuuaccuccgaaccgca

SEQ ID NO: 2040 - RNA, 19 nt, Artificial Sequence
  Description of Artificial Sequence: Synthetic oligonucleotide
guuuaccuccgaaccgcau

SEQ ID NO: 2041 - RNA, 19 nt, Artificial Sequence
  Description of Artificial Sequence: Synthetic oligonucleotide
uuuaccuccgaaccgcaug

SEQ ID NO: 2042 - RNA, 19 nt, Artificial Sequence
  Description of Artificial Sequence: Synthetic oligonucleotide
uuaccuccgaaccgcaugc

SEQ ID NO: 2043 - RNA, 19 nt, Artificial Sequence
  Description of Artificial Sequence: Synthetic oligonucleotide
uaccuccgaaccgcaugca

SEQ ID NO: 2044 - RNA, 19 nt, Artificial Sequence
  Description of Artificial Sequence: Synthetic oligonucleotide
accuccgaaccgcaugcac

SEQ ID NO: 2045 - RNA, 19 nt, Artificial Sequence
  Description of Artificial Sequence: Synthetic oligonucleotide
ccuccgaaccgcaugcaca

SEQ ID NO: 2046 - RNA, 19 nt, Artificial Sequence
  Description of Artificial Sequence: Synthetic oligonucleotide
cuccgaaccgcaugcacaa

SEQ ID NO: 2047 - RNA, 19 nt, Artificial Sequence
  Description of Artificial Sequence: Synthetic oligonucleotide
uccgaaccgcaugcacaac

SEQ ID NO: 2048 - RNA, 19 nt, Artificial Sequence
  Description of Artificial Sequence: Synthetic oligonucleotide
ccgaaccgcaugcacaacu

SEQ ID NO: 2049 - RNA, 19 nt, Artificial Sequence
  Description of Artificial Sequence: Synthetic oligonucleotide
cgaaccgcaugcacaacug

SEQ ID NO: 2050 - RNA, 19 nt, Artificial Sequence
  Description of Artificial Sequence: Synthetic oligonucleotide
gaaccgcaugcacaacugg

SEQ ID NO: 2051 - RNA, 19 nt, Artificial Sequence
  Description of Artificial Sequence: Synthetic oligonucleotide
aaccgcaugcacaacugga

SEQ ID NO: 2052 - RNA, 19 nt, Artificial Sequence
  Description of Artificial Sequence: Synthetic oligonucleotide
accgcaugcacaacuggag

SEQ ID NO: 2053 - RNA, 19 nt, Artificial Sequence
  Description of Artificial Sequence: Synthetic oligonucleotide
ccgcaugcacaacuggagg

SEQ ID NO: 2054 - RNA, 19 nt, Artificial Sequence
  Description of Artificial Sequence: Synthetic oligonucleotide
cgcaugcacaacuggagga

SEQ ID NO: 2055 - RNA, 19 nt, Artificial Sequence
  Description of Artificial Sequence: Synthetic oligonucleotide
gcaugcacaacuggaggag

SEQ ID NO: 2056 - RNA, 19 nt, Artificial Sequence
  Description of Artificial Sequence: Synthetic oligonucleotide
caugcacaacuggaggaga

SEQ ID NO: 2057 - RNA, 19 nt, Artificial Sequence
  Description of Artificial Sequence: Synthetic oligonucleotide
augcacaacuggaggagaa

SEQ ID NO: 2058 - RNA, 19 nt, Artificial Sequence
  Description of Artificial Sequence: Synthetic oligonucleotide
ugcacaacuggaggagaac

SEQ ID NO: 2059 - RNA, 19 nt, Artificial Sequence
  Description of Artificial Sequence: Synthetic oligonucleotide
gcacaacuggaggagaacu

SEQ ID NO: 2060 - RNA, 19 nt, Artificial Sequence
  Description of Artificial Sequence: Synthetic oligonucleotide
cacaacuggaggagaacuu

SEQ ID NO: 2061 - RNA, 19 nt, Artificial Sequence
  Description of Artificial Sequence: Synthetic oligonucleotide
acaacuggaggagaacuuc

SEQ ID NO: 2062 - RNA, 19 nt, Artificial Sequence
  Description of Artificial Sequence: Synthetic oligonucleotide
caacuggaggagaacuucu

SEQ ID NO: 2063 - RNA, 19 nt, Artificial Sequence
  Description of Artificial Sequence: Synthetic oligonucleotide
aacuggaggagaacuucug

SEQ ID NO: 2064 - RNA, 19 nt, Artificial Sequence
  Description of Artificial Sequence: Synthetic oligonucleotide
acuggaggagaacuucugc

SEQ ID NO: 2065 - RNA, 19 nt, Artificial Sequence
  Description of Artificial Sequence: Synthetic oligonucleotide
cuggaggagaacuucugcc

SEQ ID NO: 2066 - RNA, 19 nt, Artificial Sequence
  Description of Artificial Sequence: Synthetic oligonucleotide
uggaggagaacuucugccg

SEQ ID NO: 2067 - RNA, 19 nt, Artificial Sequence
  Description of Artificial Sequence: Synthetic oligonucleotide
ggaggagaacuucugccgg

SEQ ID NO: 2068 - RNA, 19 nt, Artificial Sequence
  Description of Artificial Sequence: Synthetic oligonucleotide
gaggagaacuucugccgga

SEQ ID NO: 2069 - RNA, 19 nt, Artificial Sequence
  Description of Artificial Sequence: Synthetic oligonucleotide
aggagaacuucugccggaa

SEQ ID NO: 2070 - RNA, 19 nt, Artificial Sequence
  Description of Artificial Sequence: Synthetic oligonucleotide
ggagaacuucugccggaac

SEQ ID NO: 2071 - RNA, 19 nt, Artificial Sequence
  Description of Artificial Sequence: Synthetic oligonucleotide
gagaacuucugccggaacc

SEQ ID NO: 2072 - RNA, 19 nt, Artificial Sequence
  Description of Artificial Sequence: Synthetic oligonucleotide
agaacuucugccggaaccc

SEQ ID NO: 2073 - RNA, 19 nt, Artificial Sequence
  Description of Artificial Sequence: Synthetic oligonucleotide
gaacuucugccggaaccca

SEQ ID NO: 2074 - RNA, 19 nt, Artificial Sequence
  Description of Artificial Sequence: Synthetic oligonucleotide
aacuucugccggaacccag

SEQ ID NO: 2075 - RNA, 19 nt, Artificial Sequence
  Description of Artificial Sequence: Synthetic oligonucleotide
acuucugccggaacccaga

SEQ ID NO: 2076 - RNA, 19 nt, Artificial Sequence
  Description of Artificial Sequence: Synthetic oligonucleotide
cuucugccggaacccagau

SEQ ID NO: 2077 - RNA, 19 nt, Artificial Sequence
  Description of Artificial Sequence: Synthetic oligonucleotide
uucugccggaacccagaug

SEQ ID NO: 2078 - RNA, 19 nt, Artificial Sequence
  Description of Artificial Sequence: Synthetic oligonucleotide
ucugccggaacccagaugg

SEQ ID NO: 2079 - RNA, 19 nt, Artificial Sequence
  Description of Artificial Sequence: Synthetic oligonucleotide
cugccggaacccagauggg

SEQ ID NO: 2080 - RNA, 19 nt, Artificial Sequence
  Description of Artificial Sequence: Synthetic oligonucleotide
ugccggaacccagaugggg

SEQ ID NO: 2081 - RNA, 19 nt, Artificial Sequence
  Description of Artificial Sequence: Synthetic oligonucleotide
gccggaacccagaugggga

SEQ ID NO: 2082 - RNA, 19 nt, Artificial Sequence
  Description of Artificial Sequence: Synthetic oligonucleotide
ccggaacccagauggggau

SEQ ID NO: 2083 - RNA, 19 nt, Artificial Sequence
  Description of Artificial Sequence: Synthetic oligonucleotide
cggaacccagauggggaua

SEQ ID NO: 2084 - RNA, 19 nt, Artificial Sequence
  Description of Artificial Sequence: Synthetic oligonucleotide
ggaacccagauggggauag

SEQ ID NO: 2085 - RNA, 19 nt, Artificial Sequence
  Description of Artificial Sequence: Synthetic oligonucleotide
gaacccagauggggauagc

SEQ ID NO: 2086 - RNA, 19 nt, Artificial Sequence
  Description of Artificial Sequence: Synthetic oligonucleotide
aacccagauggggauagcc

SEQ ID NO: 2087 - RNA, 19 nt, Artificial Sequence
  Description of Artificial Sequence: Synthetic oligonucleotide
acccagauggggauagcca

SEQ ID NO: 2088 - RNA, 19 nt, Artificial Sequence
  Description of Artificial Sequence: Synthetic oligonucleotide
cccagauggggauagccau

SEQ ID NO: 2089 - RNA, 19 nt, Artificial Sequence
  Description of Artificial Sequence: Synthetic oligonucleotide
ccagauggggauagccaug

SEQ ID NO: 2090 - RNA, 19 nt, Artificial Sequence
  Description of Artificial Sequence: Synthetic oligonucleotide
cagauggggauagccaugg

SEQ ID NO: 2091 - RNA, 19 nt, Artificial Sequence
  Description of Artificial Sequence: Synthetic oligonucleotide
agauggggauagccauggg

SEQ ID NO: 2092 - RNA, 19 nt, Artificial Sequence
  Description of Artificial Sequence: Synthetic oligonucleotide
gauggggauagccaugggc

SEQ ID NO: 2093 - RNA, 19 nt, Artificial Sequence
  Description of Artificial Sequence: Synthetic oligonucleotide
auggggauagccaugggcc

SEQ ID NO: 2094 - RNA, 19 nt, Artificial Sequence
  Description of Artificial Sequence: Synthetic oligonucleotide
uggggauagccaugggccc

SEQ ID NO: 2095 - RNA, 19 nt, Artificial Sequence
  Description of Artificial Sequence: Synthetic oligonucleotide
ggggauagccaugggcccu

SEQ ID NO: 2096 - RNA, 19 nt, Artificial Sequence
  Description of Artificial Sequence: Synthetic oligonucleotide
gggauagccaugggcccug

SEQ ID NO: 2097 - RNA, 19 nt, Artificial Sequence
  Description of Artificial Sequence: Synthetic oligonucleotide
ggauagccaugggcccugg

SEQ ID NO: 2098 - RNA, 19 nt, Artificial Sequence
  Description of Artificial Sequence: Synthetic oligonucleotide
gauagccaugggcccuggu

SEQ ID NO: 2099 - RNA, 19 nt, Artificial Sequence
  Description of Artificial Sequence: Synthetic oligonucleotide
auagccaugggcccuggug

SEQ ID NO: 2100 - RNA, 19 nt, Artificial Sequence
  Description of Artificial Sequence: Synthetic oligonucleotide
uagccaugggcccuggugc

SEQ ID NO: 2101 - RNA, 19 nt, Artificial Sequence
  Description of Artificial Sequence: Synthetic oligonucleotide
agccaugggcccuggugcu

SEQ ID NO: 2102 - RNA, 19 nt, Artificial Sequence
  Description of Artificial Sequence: Synthetic oligonucleotide
gccaugggcccuggugcua

SEQ ID NO: 2103 - RNA, 19 nt, Artificial Sequence
  Description of Artificial Sequence: Synthetic oligonucleotide
ccaugggcccuggugcuac

SEQ ID NO: 2104 - RNA, 19 nt, Artificial Sequence
  Description of Artificial Sequence: Synthetic oligonucleotide
caugggcccuggugcuaca

SEQ ID NO: 2105 - RNA, 19 nt, Artificial Sequence
  Description of Artificial Sequence: Synthetic oligonucleotide
augggcccuggugcuacac

SEQ ID NO: 2106 - RNA, 19 nt, Artificial Sequence
  Description of Artificial Sequence: Synthetic oligonucleotide
ugggcccuggugcuacacg

SEQ ID NO: 2107 - RNA, 19 nt, Artificial Sequence
  Description of Artificial Sequence: Synthetic oligonucleotide
gggcccuggugcuacacga

SEQ ID NO: 2108 - RNA, 19 nt, Artificial Sequence
  Description of Artificial Sequence: Synthetic oligonucleotide
ggcccuggugcuacacgau

SEQ ID NO: 2109 - RNA, 19 nt, Artificial Sequence
  Description of Artificial Sequence: Synthetic oligonucleotide
gcccuggugcuacacgaug

SEQ ID NO: 2110 - RNA, 19 nt, Artificial Sequence
  Description of Artificial Sequence: Synthetic oligonucleotide
cccuggugcuacacgaugg

SEQ ID NO: 2111 - RNA, 19 nt, Artificial Sequence
  Description of Artificial Sequence: Synthetic oligonucleotide
ccuggugcuacacgaugga

SEQ ID NO: 2112 - RNA, 19 nt, Artificial Sequence
  Description of Artificial Sequence: Synthetic oligonucleotide
cuggugcuacacgauggac

SEQ ID NO: 2113 - RNA, 19 nt, Artificial Sequence
  Description of Artificial Sequence: Synthetic oligonucleotide
uggugcuacacgauggacc

SEQ ID NO: 2114 - RNA, 19 nt, Artificial Sequence
  Description of Artificial Sequence: Synthetic oligonucleotide
ggugcuacacgauggaccc

SEQ ID NO: 2115 - RNA, 19 nt, Artificial Sequence
  Description of Artificial Sequence: Synthetic oligonucleotide
gugcuacacgauggaccca

SEQ ID NO: 2116 - RNA, 19 nt, Artificial Sequence
  Description of Artificial Sequence: Synthetic oligonucleotide
ugcuacacgauggacccaa

SEQ ID NO: 2117 - RNA, 19 nt, Artificial Sequence
  Description of Artificial Sequence: Synthetic oligonucleotide
gcuacacgauggacccaag

SEQ ID NO: 2118 - RNA, 19 nt, Artificial Sequence
  Description of Artificial Sequence: Synthetic oligonucleotide
cuacacgauggacccaagg

SEQ ID NO: 2119 - RNA, 19 nt, Artificial Sequence
  Description of Artificial Sequence: Synthetic oligonucleotide
uacacgauggacccaagga

SEQ ID NO: 2120 - RNA, 19 nt, Artificial Sequence
  Description of Artificial Sequence: Synthetic oligonucleotide
acacgauggacccaaggac

SEQ ID NO: 2121 - RNA, 19 nt, Artificial Sequence
  Description of Artificial Sequence: Synthetic oligonucleotide
cacgauggacccaaggacc

SEQ ID NO: 2122 - RNA, 19 nt, Artificial Sequence
  Description of Artificial Sequence: Synthetic oligonucleotide
acgauggacccaaggaccc

SEQ ID NO: 2123 - RNA, 19 nt, Artificial Sequence
  Description of Artificial Sequence: Synthetic oligonucleotide
cgauggacccaaggacccc

SEQ ID NO: 2124 - RNA, 19 nt, Artificial Sequence
  Description of Artificial Sequence: Synthetic oligonucleotide
gauggacccaaggacccca

SEQ ID NO: 2125 - RNA, 19 nt, Artificial Sequence
  Description of Artificial Sequence: Synthetic oligonucleotide
auggacccaaggaccccau

SEQ ID NO: 2126 - RNA, 19 nt, Artificial Sequence
  Description of Artificial Sequence: Synthetic oligonucleotide
uggacccaaggaccccauu

SEQ ID NO: 2127 - RNA, 19 nt, Artificial Sequence
  Description of Artificial Sequence: Synthetic oligonucleotide
ggacccaaggaccccauuc

SEQ ID NO: 2128 - RNA, 19 nt, Artificial Sequence
  Description of Artificial Sequence: Synthetic oligonucleotide
gacccaaggaccccauucg

SEQ ID NO: 2129 - RNA, 19 nt, Artificial Sequence
  Description of Artificial Sequence: Synthetic oligonucleotide
acccaaggaccccauucga

SEQ ID NO: 2130 - RNA, 19 nt, Artificial Sequence
  Description of Artificial Sequence: Synthetic oligonucleotide
cccaaggaccccauucgac

SEQ ID NO: 2131 - RNA, 19 nt, Artificial Sequence
  Description of Artificial Sequence: Synthetic oligonucleotide
ccaaggaccccauucgacu

SEQ ID NO: 2132 - RNA, 19 nt, Artificial Sequence
  Description of Artificial Sequence: Synthetic oligonucleotide
caaggaccccauucgacua

SEQ ID NO: 2133 - RNA, 19 nt, Artificial Sequence
  Description of Artificial Sequence: Synthetic oligonucleotide
aaggaccccauucgacuac

SEQ ID NO: 2134 - RNA, 19 nt, Artificial Sequence
  Description of Artificial Sequence: Synthetic oligonucleotide
aggaccccauucgacuacu

SEQ ID NO: 2135 - RNA, 19 nt, Artificial Sequence
  Description of Artificial Sequence: Synthetic oligonucleotide
ggaccccauucgacuacug

SEQ ID NO: 2136 - RNA, 19 nt, Artificial Sequence
  Description of Artificial Sequence: Synthetic oligonucleotide
gaccccauucgacuacugu

SEQ ID NO: 2137 - RNA, 19 nt, Artificial Sequence
  Description of Artificial Sequence: Synthetic oligonucleotide
accccauucgacuacugug

SEQ ID NO: 2138 - RNA, 19 nt, Artificial Sequence
  Description of Artificial Sequence: Synthetic oligonucleotide
ccccauucgacuacugugc

SEQ ID NO: 2139 - RNA, 19 nt, Artificial Sequence
  Description of Artificial Sequence: Synthetic oligonucleotide
cccauucgacuacugugcc

SEQ ID NO: 2140 - RNA, 19 nt, Artificial Sequence
  Description of Artificial Sequence: Synthetic oligonucleotide
ccauucgacuacugugccc

SEQ ID NO: 2141 - RNA, 19 nt, Artificial Sequence
  Description of Artificial Sequence: Synthetic oligonucleotide
cauucgacuacugugcccu

SEQ ID NO: 2142 - RNA, 19 nt, Artificial Sequence
  Description of Artificial Sequence: Synthetic oligonucleotide
auucgacuacugugcccug

SEQ ID NO: 2143 - RNA, 19 nt, Artificial Sequence
  Description of Artificial Sequence: Synthetic oligonucleotide
uucgacuacugugcccugc

SEQ ID NO: 2144 - RNA, 19 nt, Artificial Sequence
  Description of Artificial Sequence: Synthetic oligonucleotide
ucgacuacugugcccugcg

SEQ ID NO: 2145 - RNA, 19 nt, Artificial Sequence
  Description of Artificial Sequence: Synthetic oligonucleotide
cgacuacugugcccugcga

SEQ ID NO: 2146 - RNA, 19 nt, Artificial Sequence
  Description of Artificial Sequence: Synthetic oligonucleotide
gacuacugugcccugcgac

SEQ ID NO: 2147 - RNA, 19 nt, Artificial Sequence
  Description of Artificial Sequence: Synthetic oligonucleotide
acuacugugcccugcgacg

SEQ ID NO: 2148 - RNA, 19 nt, Artificial Sequence
  Description of Artificial Sequence: Synthetic oligonucleotide
cuacugugcccugcgacgc

SEQ ID NO: 2149 - RNA, 19 nt, Artificial Sequence
  Description of Artificial Sequence: Synthetic oligonucleotide
uacugugcccugcgacgcu

SEQ ID NO: 2150 - RNA, 19 nt, Artificial Sequence
  Description of Artificial Sequence: Synthetic oligonucleotide
acugugcccugcgacgcug

SEQ ID NO: 2151 - RNA, 19 nt, Artificial Sequence
  Description of Artificial Sequence: Synthetic oligonucleotide
cugugcccugcgacgcugc

SEQ ID NO: 2152 - RNA, 19 nt, Artificial Sequence
  Description of Artificial Sequence: Synthetic oligonucleotide
ugugcccugcgacgcugcg

SEQ ID NO: 2153 - RNA, 19 nt, Artificial Sequence
  Description of Artificial Sequence: Synthetic oligonucleotide
gugcccugcgacgcugcgc

SEQ ID NO: 2154 - RNA, 19 nt, Artificial Sequence
  Description of Artificial Sequence: Synthetic oligonucleotide
ugcccugcgacgcugcgcu

SEQ ID NO: 2155 - RNA, 19 nt, Artificial Sequence
  Description of Artificial Sequence: Synthetic oligonucleotide
gcccugcgacgcugcgcug

SEQ ID NO: 2156 - RNA, 19 nt, Artificial Sequence
  Description of Artificial Sequence: Synthetic oligonucleotide
cccugcgacgcugcgcuga

SEQ ID NO: 2157 - RNA, 19 nt, Artificial Sequence
  Description of Artificial Sequence: Synthetic oligonucleotide
ccugcgacgcugcgcugau

SEQ ID NO: 2158 - RNA, 19 nt, Artificial Sequence
  Description of Artificial Sequence: Synthetic oligonucleotide
cugcgacgcugcgcugaug

SEQ ID NO: 2159 - RNA, 19 nt, Artificial Sequence
  Description of Artificial Sequence: Synthetic oligonucleotide
ugcgacgcugcgcugauga

SEQ ID NO: 2160 - RNA, 19 nt, Artificial Sequence
  Description of Artificial Sequence: Synthetic oligonucleotide
gcgacgcugcgcugaugac

SEQ ID NO: 2161 - RNA, 19 nt, Artificial Sequence
  Description of Artificial Sequence: Synthetic oligonucleotide
cgacgcugcgcugaugacc

SEQ ID NO: 2162 - RNA, 19 nt, Artificial Sequence
  Description of Artificial Sequence: Synthetic oligonucleotide
gacgcugcgcugaugacca

SEQ ID NO: 2163 - RNA, 19 nt, Artificial Sequence
  Description of Artificial Sequence: Synthetic oligonucleotide
acgcugcgcugaugaccag

SEQ ID NO: 2164 - RNA, 19 nt, Artificial Sequence
  Description of Artificial Sequence: Synthetic oligonucleotide
cgcugcgcugaugaccagc

SEQ ID NO: 2165 - RNA, 19 nt, Artificial Sequence
  Description of Artificial Sequence: Synthetic oligonucleotide
gcugcgcugaugaccagcc

SEQ ID NO: 2166 - RNA, 19 nt, Artificial Sequence
  Description of Artificial Sequence: Synthetic oligonucleotide
cugcgcugaugaccagccg

SEQ ID NO: 2167 - RNA, 19 nt, Artificial Sequence
  Description of Artificial Sequence: Synthetic oligonucleotide
ugcgcugaugaccagccgc

SEQ ID NO: 2168 - RNA, 19 nt, Artificial Sequence
  Description of Artificial Sequence: Synthetic oligonucleotide
gcgcugaugaccagccgcc

SEQ ID NO: 2169 - RNA, 19 nt, Artificial Sequence
  Description of Artificial Sequence: Synthetic oligonucleotide
cgcugaugaccagccgcca

SEQ ID NO: 2170 - RNA, 19 nt, Artificial Sequence
  Description of Artificial Sequence: Synthetic oligonucleotide
gcugaugaccagccgccau

SEQ ID NO: 2171 - RNA, 19 nt, Artificial Sequence
  Description of Artificial Sequence: Synthetic oligonucleotide
cugaugaccagccgccauc

SEQ ID NO: 2172 - RNA, 19 nt, Artificial Sequence
  Description of Artificial Sequence: Synthetic oligonucleotide
ugaugaccagccgccauca

SEQ ID NO: 2173 - RNA, 19 nt, Artificial Sequence
  Description of Artificial Sequence: Synthetic oligonucleotide
gaugaccagccgccaucaa

SEQ ID NO: 2174 - RNA, 19 nt, Artificial Sequence
  Description of Artificial Sequence: Synthetic oligonucleotide
augaccagccgccaucaau

SEQ ID NO: 2175 - RNA, 19 nt, Artificial Sequence
  Description of Artificial Sequence: Synthetic oligonucleotide
ugaccagccgccaucaauc

SEQ ID NO: 2176 - RNA, 19 nt, Artificial Sequence
  Description of Artificial Sequence: Synthetic oligonucleotide
gaccagccgccaucaaucc

SEQ ID NO: 2177 - RNA, 19 nt, Artificial Sequence
  Description of Artificial Sequence: Synthetic oligonucleotide
accagccgccaucaauccu

SEQ ID NO: 2178 - RNA, 19 nt, Artificial Sequence
  Description of Artificial Sequence: Synthetic oligonucleotide
ccagccgccaucaauccug

SEQ ID NO: 2179 - RNA, 19 nt, Artificial Sequence
  Description of Artificial Sequence: Synthetic oligonucleotide
cagccgccaucaauccugg

SEQ ID NO: 2180 - RNA, 19 nt, Artificial Sequence
  Description of Artificial Sequence: Synthetic oligonucleotide
agccgccaucaauccugga

SEQ ID NO: 2181 - RNA, 19 nt, Artificial Sequence
  Description of Artificial Sequence: Synthetic oligonucleotide
gccgccaucaauccuggac

SEQ ID NO: 2182 - RNA, 19 nt, Artificial Sequence
  Description of Artificial Sequence: Synthetic oligonucleotide
ccgccaucaauccuggacc

SEQ ID NO: 2183 - RNA, 19 nt, Artificial Sequence
  Description of Artificial Sequence: Synthetic oligonucleotide
cgccaucaauccuggaccc

SEQ ID NO: 2184 - RNA, 19 nt, Artificial Sequence
  Description of Artificial Sequence: Synthetic oligonucleotide
gccaucaauccuggacccc

SEQ ID NO: 2185 - RNA, 19 nt, Artificial Sequence
  Description of Artificial Sequence: Synthetic oligonucleotide
ccaucaauccuggaccccc

SEQ ID NO: 2186 - RNA, 19 nt, Artificial Sequence
  Description of Artificial Sequence: Synthetic oligonucleotide
caucaauccuggacccccc

SEQ ID NO: 2187 - RNA, 19 nt, Artificial Sequence
  Description of Artificial Sequence: Synthetic oligonucleotide
aucaauccuggacccccca

SEQ ID NO: 2188 - RNA, 19 nt, Artificial Sequence
  Description of Artificial Sequence: Synthetic oligonucleotide
ucaauccuggaccccccag

SEQ ID NO: 2189 - RNA, 19 nt, Artificial Sequence
  Description of Artificial Sequence: Synthetic oligonucleotide
caauccuggaccccccaga

SEQ ID NO: 2190 - RNA, 19 nt, Artificial Sequence
  Description of Artificial Sequence: Synthetic oligonucleotide
aauccuggaccccccagac

SEQ ID NO: 2191 - RNA, 19 nt, Artificial Sequence
  Description of Artificial Sequence: Synthetic oligonucleotide
auccuggaccccccagacc

SEQ ID NO: 2192 - RNA, 19 nt, Artificial Sequence
  Description of Artificial Sequence: Synthetic oligonucleotide
uccuggaccccccagacca

SEQ ID NO: 2193 - RNA, 19 nt, Artificial Sequence
  Description of Artificial Sequence: Synthetic oligonucleotide
ccuggaccccccagaccag

SEQ ID NO: 2194 - RNA, 19 nt, Artificial Sequence
  Description of Artificial Sequence: Synthetic oligonucleotide
cuggaccccccagaccagg

SEQ ID NO: 2195 - RNA, 19 nt, Artificial Sequence
  Description of Artificial Sequence: Synthetic oligonucleotide
uggaccccccagaccaggu

SEQ ID NO: 2196 - RNA, 19 nt, Artificial Sequence
  Description of Artificial Sequence: Synthetic oligonucleotide
ggaccccccagaccaggug

SEQ ID NO: 2197 - RNA, 19 nt, Artificial Sequence
  Description of Artificial Sequence: Synthetic oligonucleotide
gaccccccagaccaggugc

SEQ ID NO: 2198 - RNA, 19 nt, Artificial Sequence
  Description of Artificial Sequence: Synthetic oligonucleotide
accccccagaccaggugca

SEQ ID NO: 2199 - RNA, 19 nt, Artificial Sequence
  Description of Artificial Sequence: Synthetic oligonucleotide
ccccccagaccaggugcag

SEQ ID NO: 2200 - RNA, 19 nt, Artificial Sequence
  Description of Artificial Sequence: Synthetic oligonucleotide
cccccagaccaggugcagu

SEQ ID NO: 2201 - RNA, 19 nt, Artificial Sequence
  Description of Artificial Sequence: Synthetic oligonucleotide
ccccagaccaggugcaguu

SEQ ID NO: 2202 - RNA, 19 nt, Artificial Sequence
  Description of Artificial Sequence: Synthetic oligonucleotide
cccagaccaggugcaguuu

SEQ ID NO: 2203 - RNA, 19 nt, Artificial Sequence
  Description of Artificial Sequence: Synthetic oligonucleotide
ccagaccaggugcaguuug

SEQ ID NO: 2204 - RNA, 19 nt, Artificial Sequence
  Description of Artificial Sequence: Synthetic oligonucleotide
cagaccaggugcaguuuga

SEQ ID NO: 2205 - RNA, 19 nt, Artificial Sequence
  Description of Artificial Sequence: Synthetic oligonucleotide
agaccaggugcaguuugag

SEQ ID NO: 2206 - RNA, 19 nt, Artificial Sequence
  Description of Artificial Sequence: Synthetic oligonucleotide
gaccaggugcaguuugaga

SEQ ID NO: 2207 - RNA, 19 nt, Artificial Sequence
  Description of Artificial Sequence: Synthetic oligonucleotide
accaggugcaguuugagaa

SEQ ID NO: 2208 - RNA, 19 nt, Artificial Sequence
  Description of Artificial Sequence: Synthetic oligonucleotide
ccaggugcaguuugagaag

SEQ ID NO: 2209 - RNA, 19 nt, Artificial Sequence
  Description of Artificial Sequence: Synthetic oligonucleotide
caggugcaguuugagaagu

SEQ ID NO: 2210 - RNA, 19 nt, Artificial Sequence
  Description of Artificial Sequence: Synthetic oligonucleotide
aggugcaguuugagaagug

SEQ ID NO: 2211 - RNA, 19 nt, Artificial Sequence
  Description of Artificial Sequence: Synthetic oligonucleotide
ggugcaguuugagaagugu

SEQ ID NO: 2212 - RNA, 19 nt, Artificial Sequence
  Description of Artificial Sequence: Synthetic oligonucleotide
gugcaguuugagaagugug

SEQ ID NO: 2213 - RNA, 19 nt, Artificial Sequence
  Description of Artificial Sequence: Synthetic oligonucleotide
ugcaguuugagaagugugg

SEQ ID NO: 2214 - RNA, 19 nt, Artificial Sequence
  Description of Artificial Sequence: Synthetic oligonucleotide
gcaguuugagaaguguggc

SEQ ID NO: 2215 - RNA, 19 nt, Artificial Sequence
  Description of Artificial Sequence: Synthetic oligonucleotide
caguuugagaaguguggca

SEQ ID NO: 2216 - RNA, 19 nt, Artificial Sequence
  Description of Artificial Sequence: Synthetic oligonucleotide
aguuugagaaguguggcaa

SEQ ID NO: 2217 - RNA, 19 nt, Artificial Sequence
  Description of Artificial Sequence: Synthetic oligonucleotide
guuugagaaguguggcaag

SEQ ID NO: 2218 - RNA, 19 nt, Artificial Sequence
  Description of Artificial Sequence: Synthetic oligonucleotide
uuugagaaguguggcaaga

SEQ ID NO: 2219 - RNA, 19 nt, Artificial Sequence
  Description of Artificial Sequence: Synthetic oligonucleotide
uugagaaguguggcaagag

SEQ ID NO: 2220 - RNA, 19 nt, Artificial Sequence
  Description of Artificial Sequence: Synthetic oligonucleotide
ugagaaguguggcaagagg

SEQ ID NO: 2221 - RNA, 19 nt, Artificial Sequence
  Description of Artificial Sequence: Synthetic oligonucleotide
gagaaguguggcaagaggg

SEQ ID NO: 2222 - RNA, 19 nt, Artificial Sequence
  Description of Artificial Sequence: Synthetic oligonucleotide
agaaguguggcaagagggu

SEQ ID NO: 2223 - RNA, 19 nt, Artificial Sequence
  Description of Artificial Sequence: Synthetic oligonucleotide
gaaguguggcaagagggug

SEQ ID NO: 2224 - RNA, 19 nt, Artificial Sequence
  Description of Artificial Sequence: Synthetic oligonucleotide
aaguguggcaagagggugg

SEQ ID NO: 2225 - RNA, 19 nt, Artificial Sequence
  Description of Artificial Sequence: Synthetic oligonucleotide
aguguggcaagagggugga

SEQ ID NO: 2226 - RNA, 19 nt, Artificial Sequence
  Description of Artificial Sequence: Synthetic oligonucleotide
guguggcaagaggguggau

SEQ ID NO: 2227 - RNA, 19 nt, Artificial Sequence
  Description of Artificial Sequence: Synthetic oligonucleotide
uguggcaagaggguggauc

SEQ ID NO: 2228 - RNA, 19 nt, Artificial Sequence
  Description of Artificial Sequence: Synthetic oligonucleotide
guggcaagaggguggaucg

SEQ ID NO: 2229 - RNA, 19 nt, Artificial Sequence
  Description of Artificial Sequence: Synthetic oligonucleotide
uggcaagaggguggaucgg

SEQ ID NO: 2230 - RNA, 19 nt, Artificial Sequence
  Description of Artificial Sequence: Synthetic oligonucleotide
ggcaagaggguggaucggc

SEQ ID NO: 2231 - RNA, 19 nt, Artificial Sequence
  Description of Artificial Sequence: Synthetic oligonucleotide
gcaagaggguggaucggcu

SEQ ID NO: 2232 - RNA, 19 nt, Artificial Sequence
  Description of Artificial Sequence: Synthetic oligonucleotide
caagaggguggaucggcug

SEQ ID NO: 2233 - RNA, 19 nt, Artificial Sequence
  Description of Artificial Sequence: Synthetic oligonucleotide
aagaggguggaucggcugg

SEQ ID NO: 2234 - RNA, 19 nt, Artificial Sequence
  Description of Artificial Sequence: Synthetic oligonucleotide
agaggguggaucggcugga

SEQ ID NO: 2235 - RNA, 19 nt, Artificial Sequence
  Description of Artificial Sequence: Synthetic oligonucleotide
gaggguggaucggcuggau

SEQ ID NO: 2236 - RNA, 19 nt, Artificial Sequence
  Description of Artificial Sequence: Synthetic oligonucleotide
aggguggaucggcuggauc

SEQ ID NO: 2237 - RNA, 19 nt, Artificial Sequence
  Description of Artificial Sequence: Synthetic oligonucleotide
ggguggaucggcuggauca

SEQ ID NO: 2238 - RNA, 19 nt, Artificial Sequence
  Description of Artificial Sequence: Synthetic oligonucleotide
gguggaucggcuggaucag

SEQ ID NO: 2239 - RNA, 19 nt, Artificial Sequence
  Description of Artificial Sequence: Synthetic oligonucleotide
guggaucggcuggaucagc

SEQ ID NO: 2240 - RNA, 19 nt, Artificial Sequence
  Description of Artificial Sequence: Synthetic oligonucleotide
uggaucggcuggaucagcg

SEQ ID NO: 2241 - RNA, 19 nt, Artificial Sequence
  Description of Artificial Sequence: Synthetic oligonucleotide
ggaucggcuggaucagcgg

SEQ ID NO: 2242 - RNA, 19 nt, Artificial Sequence
  Description of Artificial Sequence: Synthetic oligonucleotide
gaucggcuggaucagcggc

SEQ ID NO: 2243 - RNA, 19 nt, Artificial Sequence
  Description of Artificial Sequence: Synthetic oligonucleotide
aucggcuggaucagcggcg

SEQ ID NO: 2244 - RNA, 19 nt, Artificial Sequence
  Description of Artificial Sequence: Synthetic oligonucleotide
ucggcuggaucagcggcgu

SEQ ID NO: 2245 - RNA, 19 nt, Artificial Sequence
  Description of Artificial Sequence: Synthetic oligonucleotide
cggcuggaucagcggcguu

SEQ ID NO: 2246 - RNA, 19 nt, Artificial Sequence
  Description of Artificial Sequence: Synthetic oligonucleotide
ggcuggaucagcggcguuc

SEQ ID NO: 2247 - RNA, 19 nt, Artificial Sequence
  Description of Artificial Sequence: Synthetic oligonucleotide
gcuggaucagcggcguucc

SEQ ID NO: 2248 - RNA, 19 nt, Artificial Sequence
  Description of Artificial Sequence: Synthetic oligonucleotide
cuggaucagcggcguucca

SEQ ID NO: 2249 - RNA, 19 nt, Artificial Sequence
  Description of Artificial Sequence: Synthetic oligonucleotide
uggaucagcggcguuccaa

SEQ ID NO: 2250 - RNA, 19 nt, Artificial Sequence
  Description of Artificial Sequence: Synthetic oligonucleotide
ggaucagcggcguuccaag

SEQ ID NO: 2251 - RNA, 19 nt, Artificial Sequence
  Description of Artificial Sequence: Synthetic oligonucleotide
gaucagcggcguuccaagc

SEQ ID NO: 2252 - RNA, 19 nt, Artificial Sequence
  Description of Artificial Sequence: Synthetic oligonucleotide
aucagcggcguuccaagcu

SEQ ID NO: 2253 - RNA, 19 nt, Artificial Sequence
  Description of Artificial Sequence: Synthetic oligonucleotide
ucagcggcguuccaagcug

SEQ ID NO: 2254 - RNA, 19 nt, Artificial Sequence
  Description of Artificial Sequence: Synthetic oligonucleotide
cagcggcguuccaagcugc

SEQ ID NO: 2255 - RNA, 19 nt, Artificial Sequence
  Description of Artificial Sequence: Synthetic oligonucleotide
agcggcguuccaagcugcg

SEQ ID NO: 2256 - RNA, 19 nt, Artificial Sequence
  Description of Artificial Sequence: Synthetic oligonucleotide
gcggcguuccaagcugcgc

SEQ ID NO: 2257 - RNA, 19 nt, Artificial Sequence
  Description of Artificial Sequence: Synthetic oligonucleotide
cggcguuccaagcugcgcg

SEQ ID NO: 2258 - RNA, 19 nt, Artificial Sequence
  Description of Artificial Sequence: Synthetic oligonucleotide
ggcguuccaagcugcgcgu

SEQ ID NO: 2259 - RNA, 19 nt, Artificial Sequence
  Description of Artificial Sequence: Synthetic oligonucleotide
gcguuccaagcugcgcgug

SEQ ID NO: 2260 - RNA, 19 nt, Artificial Sequence
  Description of Artificial Sequence: Synthetic oligonucleotide
cguuccaagcugcgcgugg

SEQ ID NO: 2261 - RNA, 19 nt, Artificial Sequence
  Description of Artificial Sequence: Synthetic oligonucleotide
guuccaagcugcgcguggu

SEQ ID NO: 2262 - RNA, 19 nt, Artificial Sequence
  Description of Artificial Sequence: Synthetic oligonucleotide
uuccaagcugcgcgugguu

SEQ ID NO: 2263 - RNA, 19 nt, Artificial Sequence
  Description of Artificial Sequence: Synthetic oligonucleotide
uccaagcugcgcgugguug

SEQ ID NO: 2264 - RNA, 19 nt, Artificial Sequence
  Description of Artificial Sequence: Synthetic oligonucleotide
ccaagcugcgcgugguugg

SEQ ID NO: 2265 - RNA, 19 nt, Artificial Sequence
  Description of Artificial Sequence: Synthetic oligonucleotide
caagcugcgcgugguuggg

SEQ ID NO: 2266 - RNA, 19 nt, Artificial Sequence
  Description of Artificial Sequence: Synthetic oligonucleotide
aagcugcgcgugguugggg

SEQ ID NO: 2267 - RNA, 19 nt, Artificial Sequence
  Description of Artificial Sequence: Synthetic oligonucleotide
agcugcgcgugguuggggg

SEQ ID NO: 2268 - RNA, 19 nt, Artificial Sequence
  Description of Artificial Sequence: Synthetic oligonucleotide
gcugcgcgugguugggggc

SEQ ID NO: 2269 - RNA, 19 nt, Artificial Sequence
  Description of Artificial Sequence: Synthetic oligonucleotide
cugcgcgugguugggggcc

SEQ ID NO: 2270 - RNA, 19 nt, Artificial Sequence
  Description of Artificial Sequence: Synthetic oligonucleotide
ugcgcgugguugggggcca

SEQ ID NO: 2271 - RNA, 19 nt, Artificial Sequence
  Description of Artificial Sequence: Synthetic oligonucleotide
gcgcgugguugggggccau

SEQ ID NO: 2272 - RNA, 19 nt, Artificial Sequence
  Description of Artificial Sequence: Synthetic oligonucleotide
cgcgugguugggggccauc

SEQ ID NO: 2273 - RNA, 19 nt, Artificial Sequence
  Description of Artificial Sequence: Synthetic oligonucleotide
gcgugguugggggccaucc

SEQ ID NO: 2274 - RNA, 19 nt, Artificial Sequence
  Description of Artificial Sequence: Synthetic oligonucleotide
cgugguugggggccauccg

SEQ ID NO: 2275 - RNA, 19 nt, Artificial Sequence
  Description of Artificial Sequence: Synthetic oligonucleotide
gugguugggggccauccgg

SEQ ID NO: 2276 - RNA, 19 nt, Artificial Sequence
  Description of Artificial Sequence: Synthetic oligonucleotide
ugguugggggccauccggg

SEQ ID NO: 2277 - RNA, 19 nt, Artificial Sequence
  Description of Artificial Sequence: Synthetic oligonucleotide
gguugggggccauccgggc

SEQ ID NO: 2278 - RNA, 19 nt, Artificial Sequence
  Description of Artificial Sequence: Synthetic oligonucleotide
guugggggccauccgggca

SEQ ID NO: 2279 - RNA, 19 nt, Artificial Sequence
  Description of Artificial Sequence: Synthetic oligonucleotide
uugggggccauccgggcaa

SEQ ID NO: 2280 - RNA, 19 nt, Artificial Sequence
  Description of Artificial Sequence: Synthetic oligonucleotide
ugggggccauccgggcaac

SEQ ID NO: 2281 - RNA, 19 nt, Artificial Sequence
  Description of Artificial Sequence: Synthetic oligonucleotide
gggggccauccgggcaacu

SEQ ID NO: 2282 - RNA, 19 nt, Artificial Sequence
  Description of Artificial Sequence: Synthetic oligonucleotide
ggggccauccgggcaacuc

SEQ ID NO: 2283 - RNA, 19 nt, Artificial Sequence
  Description of Artificial Sequence: Synthetic oligonucleotide
gggccauccgggcaacuca

SEQ ID NO: 2284 - RNA, 19 nt, Artificial Sequence
  Description of Artificial Sequence: Synthetic oligonucleotide
ggccauccgggcaacucac

SEQ ID NO: 2285 - RNA, 19 nt, Artificial Sequence
  Description of Artificial Sequence: Synthetic oligonucleotide
gccauccgggcaacucacc

SEQ ID NO: 2286 - RNA, 19 nt, Artificial Sequence
  Description of Artificial Sequence: Synthetic oligonucleotide
ccauccgggcaacucaccc

SEQ ID NO: 2287 - RNA, 19 nt, Artificial Sequence
  Description of Artificial Sequence: Synthetic oligonucleotide
cauccgggcaacucacccu

SEQ ID NO: 2288 - RNA, 19 nt, Artificial Sequence
  Description of Artificial Sequence: Synthetic oligonucleotide
auccgggcaacucacccug

SEQ ID NO: 2289 - RNA, 19 nt, Artificial Sequence
  Description of Artificial Sequence: Synthetic oligonucleotide
uccgggcaacucacccugg

SEQ ID NO: 2290 - RNA, 19 nt, Artificial Sequence
  Description of Artificial Sequence: Synthetic oligonucleotide
ccgggcaacucacccugga

SEQ ID NO: 2291 - RNA, 19 nt, Artificial Sequence
  Description of Artificial Sequence: Synthetic oligonucleotide
cgggcaacucacccuggac

SEQ ID NO: 2292 - RNA, 19 nt, Artificial Sequence
  Description of Artificial Sequence: Synthetic oligonucleotide
gggcaacucacccuggaca

SEQ ID NO: 2293 - RNA, 19 nt, Artificial Sequence
  Description of Artificial Sequence: Synthetic oligonucleotide
ggcaacucacccuggacag

SEQ ID NO: 2294 - RNA, 19 nt, Artificial Sequence
  Description of Artificial Sequence: Synthetic oligonucleotide
gcaacucacccuggacagu

SEQ ID NO: 2295 - RNA, 19 nt, Artificial Sequence
  Description of Artificial Sequence: Synthetic oligonucleotide
caacucacccuggacaguc

SEQ ID NO: 2296 - RNA, 19 nt, Artificial Sequence
  Description of Artificial Sequence: Synthetic oligonucleotide
aacucacccuggacaguca

SEQ ID NO: 2297 - RNA, 19 nt, Artificial Sequence
  Description of Artificial Sequence: Synthetic oligonucleotide
acucacccuggacagucag

SEQ ID NO: 2298 - RNA, 19 nt, Artificial Sequence
  Description of Artificial Sequence: Synthetic oligonucleotide
cucacccuggacagucagc

SEQ ID NO: 2299 - RNA, 19 nt, Artificial Sequence
  Description of Artificial Sequence: Synthetic oligonucleotide
ucacccuggacagucagcu

SEQ ID NO: 2300 - RNA, 19 nt, Artificial Sequence
  Description of Artificial Sequence: Synthetic oligonucleotide
cacccuggacagucagcuu

SEQ ID NO: 2301 - RNA, 19 nt, Artificial Sequence
  Description of Artificial Sequence: Synthetic oligonucleotide
acccuggacagucagcuug

SEQ ID NO: 2302 - RNA, 19 nt, Artificial Sequence
  Description of Artificial Sequence: Synthetic oligonucleotide
cccuggacagucagcuugc

SEQ ID NO: 2303 - RNA, 19 nt, Artificial Sequence
  Description of Artificial Sequence: Synthetic oligonucleotide
ccuggacagucagcuugcg

SEQ ID NO: 2304 - RNA, 19 nt, Artificial Sequence
  Description of Artificial Sequence: Synthetic oligonucleotide
cuggacagucagcuugcgg

SEQ ID NO: 2305 - RNA, 19 nt, Artificial Sequence
  Description of Artificial Sequence: Synthetic oligonucleotide
uggacagucagcuugcgga

SEQ ID NO: 2306 - RNA, 19 nt, Artificial Sequence
  Description of Artificial Sequence: Synthetic oligonucleotide
ggacagucagcuugcggaa

SEQ ID NO: 2307 - RNA, 19 nt, Artificial Sequence
  Description of Artificial Sequence: Synthetic oligonucleotide
gacagucagcuugcggaau

SEQ ID NO: 2308 - RNA, 19 nt, Artificial Sequence
  Description of Artificial Sequence: Synthetic oligonucleotide
acagucagcuugcggaauc

SEQ ID NO: 2309 - RNA, 19 nt, Artificial Sequence
  Description of Artificial Sequence: Synthetic oligonucleotide
cagucagcuugcggaaucg

SEQ ID NO: 2310 - RNA, 19 nt, Artificial Sequence
  Description of Artificial Sequence: Synthetic oligonucleotide
agucagcuugcggaaucgg

SEQ ID NO: 2311 - RNA, 19 nt, Artificial Sequence
  Description of Artificial Sequence: Synthetic oligonucleotide
gucagcuugcggaaucggc

SEQ ID NO: 2312 - RNA, 19 nt, Artificial Sequence
  Description of Artificial Sequence: Synthetic oligonucleotide
ucagcuugcggaaucggca

SEQ ID NO: 2313 - RNA, 19 nt, Artificial Sequence
  Description of Artificial Sequence: Synthetic oligonucleotide
cagcuugcggaaucggcag

SEQ ID NO: 2314 - RNA, 19 nt, Artificial Sequence
  Description of Artificial Sequence: Synthetic oligonucleotide
agcuugcggaaucggcagg

SEQ ID NO: 2315 - RNA, 19 nt, Artificial Sequence
  Description of Artificial Sequence: Synthetic oligonucleotide
gcuugcggaaucggcaggg

SEQ ID NO: 2316 - RNA, 19 nt, Artificial Sequence
  Description of Artificial Sequence: Synthetic oligonucleotide
cuugcggaaucggcagggc

SEQ ID NO: 2317 - RNA, 19 nt, Artificial Sequence
  Description of Artificial Sequence: Synthetic oligonucleotide
uugcggaaucggcagggcc

SEQ ID NO: 2318 - RNA, 19 nt, Artificial Sequence
  Description of Artificial Sequence: Synthetic oligonucleotide
ugcggaaucggcagggcca

SEQ ID NO: 2319 - RNA, 19 nt, Artificial Sequence
  Description of Artificial Sequence: Synthetic oligonucleotide
gcggaaucggcagggccag

SEQ ID NO: 2320 - RNA, 19 nt, Artificial Sequence
  Description of Artificial Sequence: Synthetic oligonucleotide
cggaaucggcagggccagc

SEQ ID NO: 2321 - RNA, 19 nt, Artificial Sequence
  Description of Artificial Sequence: Synthetic oligonucleotide
ggaaucggcagggccagca

SEQ ID NO: 2322 - RNA, 19 nt, Artificial Sequence
  Description of Artificial Sequence: Synthetic oligonucleotide
gaaucggcagggccagcau

SEQ ID NO: 2323 - RNA, 19 nt, Artificial Sequence
  Description of Artificial Sequence: Synthetic oligonucleotide
aaucggcagggccagcauu

SEQ ID NO: 2324 - RNA, 19 nt, Artificial Sequence
  Description of Artificial Sequence: Synthetic oligonucleotide
aucggcagggccagcauuu

SEQ ID NO: 2325 - RNA, 19 nt, Artificial Sequence
  Description of Artificial Sequence: Synthetic oligonucleotide
ucggcagggccagcauuuc

SEQ ID NO: 2326 - RNA, 19 nt, Artificial Sequence
  Description of Artificial Sequence: Synthetic oligonucleotide
cggcagggccagcauuucu

SEQ ID NO: 2327 - RNA, 19 nt, Artificial Sequence
  Description of Artificial Sequence: Synthetic oligonucleotide
ggcagggccagcauuucug

SEQ ID NO: 2328 - RNA, 19 nt, Artificial Sequence
  Description of Artificial Sequence: Synthetic oligonucleotide
gcagggccagcauuucugc

SEQ ID NO: 2329 - RNA, 19 nt, Artificial Sequence
  Description of Artificial Sequence: Synthetic oligonucleotide
cagggccagcauuucugcg

SEQ ID NO: 2330 - RNA, 19 nt, Artificial Sequence
  Description of Artificial Sequence: Synthetic oligonucleotide
agggccagcauuucugcgg

SEQ ID NO: 2331 - RNA, 19 nt, Artificial Sequence
  Description of Artificial Sequence: Synthetic oligonucleotide
gggccagcauuucugcggg

SEQ ID NO: 2332 - RNA, 19 nt, Artificial Sequence
  Description of Artificial Sequence: Synthetic oligonucleotide
ggccagcauuucugcgggg

SEQ ID NO: 2333 - RNA, 19 nt, Artificial Sequence
  Description of Artificial Sequence: Synthetic oligonucleotide
gccagcauuucugcggggg

SEQ ID NO: 2334 - RNA, 19 nt, Artificial Sequence
  Description of Artificial Sequence: Synthetic oligonucleotide
ccagcauuucugcgggggg

SEQ ID NO: 2335 - RNA, 19 nt, Artificial Sequence
  Description of Artificial Sequence: Synthetic oligonucleotide
cagcauuucugcggggggu

SEQ ID NO: 2336 - RNA, 19 nt, Artificial Sequence
  Description of Artificial Sequence: Synthetic oligonucleotide
agcauuucugcgggggguc

SEQ ID NO: 2337 - RNA, 19 nt, Artificial Sequence
  Description of Artificial Sequence: Synthetic oligonucleotide
gcauuucugcggggggucu

SEQ ID NO: 2338 - RNA, 19 nt, Artificial Sequence
  Description of Artificial Sequence: Synthetic oligonucleotide
cauuucugcggggggucuc

SEQ ID NO: 2339 - RNA, 19 nt, Artificial Sequence
  Description of Artificial Sequence: Synthetic oligonucleotide
auuucugcggggggucucu

SEQ ID NO: 2340 - RNA, 19 nt, Artificial Sequence
  Description of Artificial Sequence: Synthetic oligonucleotide
uuucugcggggggucucua

SEQ ID NO: 2341 - RNA, 19 nt, Artificial Sequence
  Description of Artificial Sequence: Synthetic oligonucleotide
uucugcggggggucucuag

SEQ ID NO: 2342 - RNA, 19 nt, Artificial Sequence
  Description of Artificial Sequence: Synthetic oligonucleotide
ucugcggggggucucuagu

SEQ ID NO: 2343 - RNA, 19 nt, Artificial Sequence
  Description of Artificial Sequence: Synthetic oligonucleotide
cugcggggggucucuagug

SEQ ID NO: 2344 - RNA, 19 nt, Artificial Sequence
  Description of Artificial Sequence: Synthetic oligonucleotide
ugcggggggucucuaguga

SEQ ID NO: 2345 - RNA, 19 nt, Artificial Sequence
  Description of Artificial Sequence: Synthetic oligonucleotide
gcggggggucucuagugaa

SEQ ID NO: 2346 - RNA, 19 nt, Artificial Sequence
  Description of Artificial Sequence: Synthetic oligonucleotide
cggggggucucuagugaag

SEQ ID NO: 2347 - RNA, 19 nt, Artificial Sequence
  Description of Artificial Sequence: Synthetic oligonucleotide
ggggggucucuagugaagg

SEQ ID NO: 2348 - RNA, 19 nt, Artificial Sequence
  Description of Artificial Sequence: Synthetic oligonucleotide
gggggucucuagugaagga

SEQ ID NO: 2349 - RNA, 19 nt, Artificial Sequence
  Description of Artificial Sequence: Synthetic oligonucleotide
ggggucucuagugaaggag

SEQ ID NO: 2350 - RNA, 19 nt, Artificial Sequence
  Description of Artificial Sequence: Synthetic oligonucleotide
gggucucuagugaaggagc

SEQ ID NO: 2351 - RNA, 19 nt, Artificial Sequence
  Description of Artificial Sequence: Synthetic oligonucleotide
ggucucuagugaaggagca

SEQ ID NO: 2352 - RNA, 19 nt, Artificial Sequence
  Description of Artificial Sequence: Synthetic oligonucleotide
gucucuagugaaggagcag

SEQ ID NO: 2353 - RNA, 19 nt, Artificial Sequence
  Description of Artificial Sequence: Synthetic oligonucleotide
ucucuagugaaggagcagu

SEQ ID NO: 2354 - RNA, 19 nt, Artificial Sequence
  Description of Artificial Sequence: Synthetic oligonucleotide
cucuagugaaggagcagug

SEQ ID NO: 2355 - RNA, 19 nt, Artificial Sequence
  Description of Artificial Sequence: Synthetic oligonucleotide
ucuagugaaggagcagugg

SEQ ID NO: 2356 - RNA, 19 nt, Artificial Sequence
  Description of Artificial Sequence: Synthetic oligonucleotide
cuagugaaggagcagugga

SEQ ID NO: 2357 - RNA, 19 nt, Artificial Sequence
  Description of Artificial Sequence: Synthetic oligonucleotide
uagugaaggagcaguggau

SEQ ID NO: 2358 - RNA, 19 nt, Artificial Sequence
  Description of Artificial Sequence: Synthetic oligonucleotide
agugaaggagcaguggaua

SEQ ID NO: 2359 - RNA, 19 nt, Artificial Sequence
  Description of Artificial Sequence: Synthetic oligonucleotide
gugaaggagcaguggauac

SEQ ID NO: 2360 - RNA, 19 nt, Artificial Sequence
  Description of Artificial Sequence: Synthetic oligonucleotide
ugaaggagcaguggauacu

SEQ ID NO: 2361 - RNA, 19 nt, Artificial Sequence
  Description of Artificial Sequence: Synthetic oligonucleotide
gaaggagcaguggauacug

SEQ ID NO: 2362 - RNA, 19 nt, Artificial Sequence
  Description of Artificial Sequence: Synthetic oligonucleotide
aaggagcaguggauacuga

SEQ ID NO: 2363 - RNA, 19 nt, Artificial Sequence
  Description of Artificial Sequence: Synthetic oligonucleotide
aggagcaguggauacugac

SEQ ID NO: 2364 - RNA, 19 nt, Artificial Sequence
  Description of Artificial Sequence: Synthetic oligonucleotide
ggagcaguggauacugacu

SEQ ID NO: 2365 - RNA, 19 nt, Artificial Sequence
  Description of Artificial Sequence: Synthetic oligonucleotide
gagcaguggauacugacug

SEQ ID NO: 2366 - RNA, 19 nt, Artificial Sequence
  Description of Artificial Sequence: Synthetic oligonucleotide
agcaguggauacugacugc

SEQ ID NO: 2367 - RNA, 19 nt, Artificial Sequence
  Description of Artificial Sequence: Synthetic oligonucleotide
gcaguggauacugacugcc

SEQ ID NO: 2368 - RNA, 19 nt, Artificial Sequence
  Description of Artificial Sequence: Synthetic oligonucleotide
caguggauacugacugccc

SEQ ID NO: 2369 - RNA, 19 nt, Artificial Sequence
  Description of Artificial Sequence: Synthetic oligonucleotide
aguggauacugacugcccg

SEQ ID NO: 2370 - RNA, 19 nt, Artificial Sequence
  Description of Artificial Sequence: Synthetic oligonucleotide
guggauacugacugcccgg

SEQ ID NO: 2371 - RNA, 19 nt, Artificial Sequence
  Description of Artificial Sequence: Synthetic oligonucleotide
uggauacugacugcccggc

SEQ ID NO: 2372 - RNA, 19 nt, Artificial Sequence
  Description of Artificial Sequence: Synthetic oligonucleotide
ggauacugacugcccggca

SEQ ID NO: 2373 - RNA, 19 nt, Artificial Sequence
  Description of Artificial Sequence: Synthetic oligonucleotide
gauacugacugcccggcag

SEQ ID NO: 2374 - RNA, 19 nt, Artificial Sequence
  Description of Artificial Sequence: Synthetic oligonucleotide
auacugacugcccggcagu

SEQ ID NO: 2375 - RNA, 19 nt, Artificial Sequence
  Description of Artificial Sequence: Synthetic oligonucleotide
uacugacugcccggcagug

SEQ ID NO: 2376 - RNA, 19 nt, Artificial Sequence
  Description of Artificial Sequence: Synthetic oligonucleotide
acugacugcccggcagugc

SEQ ID NO: 2377 - RNA, 19 nt, Artificial Sequence
  Description of Artificial Sequence: Synthetic oligonucleotide
cugacugcccggcagugcu

SEQ ID NO: 2378 - RNA, 19 nt, Artificial Sequence
  Description of Artificial Sequence: Synthetic oligonucleotide
ugacugcccggcagugcuu

SEQ ID NO: 2379 - RNA, 19 nt, Artificial Sequence
  Description of Artificial Sequence: Synthetic oligonucleotide
gacugcccggcagugcuuc

SEQ ID NO: 2380 - RNA, 19 nt, Artificial Sequence
  Description of Artificial Sequence: Synthetic oligonucleotide
acugcccggcagugcuucu

SEQ ID NO: 2381 - RNA, 19 nt, Artificial Sequence
  Description of Artificial Sequence: Synthetic oligonucleotide
cugcccggcagugcuucuc

SEQ ID NO: 2382 - RNA, 19 nt, Artificial Sequence
  Description of Artificial Sequence: Synthetic oligonucleotide
ugcccggcagugcuucucc

SEQ ID NO: 2383 - RNA, 19 nt, Artificial Sequence
  Description of Artificial Sequence: Synthetic oligonucleotide
gcccggcagugcuucuccu

SEQ ID NO: 2384 - RNA, 19 nt, Artificial Sequence
  Description of Artificial Sequence: Synthetic oligonucleotide
cccggcagugcuucuccuc

SEQ ID NO: 2385 - RNA, 19 nt, Artificial Sequence
  Description of Artificial Sequence: Synthetic oligonucleotide
ccggcagugcuucuccucc

SEQ ID NO: 2386 - RNA, 19 nt, Artificial Sequence
  Description of Artificial Sequence: Synthetic oligonucleotide
cggcagugcuucuccuccu

SEQ ID NO: 2387 - RNA, 19 nt, Artificial Sequence
  Description of Artificial Sequence: Synthetic oligonucleotide
ggcagugcuucuccuccug

SEQ ID NO: 2388 - RNA, 19 nt, Artificial Sequence
  Description of Artificial Sequence: Synthetic oligonucleotide
gcagugcuucuccuccugc

SEQ ID NO: 2389 - RNA, 19 nt, Artificial Sequence
  Description of Artificial Sequence: Synthetic oligonucleotide
cagugcuucuccuccugcc

SEQ ID NO: 2390 - RNA, 19 nt, Artificial Sequence
  Description of Artificial Sequence: Synthetic oligonucleotide
agugcuucuccuccugcca

SEQ ID NO: 2391 - RNA, 19 nt, Artificial Sequence
  Description of Artificial Sequence: Synthetic oligonucleotide
gugcuucuccuccugccau

SEQ ID NO: 2392 - RNA, 19 nt, Artificial Sequence
  Description of Artificial Sequence: Synthetic oligonucleotide
ugcuucuccuccugccaua

SEQ ID NO: 2393 - RNA, 19 nt, Artificial Sequence
  Description of Artificial Sequence: Synthetic oligonucleotide
gcuucuccuccugccauau

SEQ ID NO: 2394 - RNA, 19 nt, Artificial Sequence
  Description of Artificial Sequence: Synthetic oligonucleotide
cuucuccuccugccauaug

SEQ ID NO: 2395 - RNA, 19 nt, Artificial Sequence
  Description of Artificial Sequence: Synthetic oligonucleotide
uucuccuccugccauaugc

SEQ ID NO: 2396 - RNA, 19 nt, Artificial Sequence
  Description of Artificial Sequence: Synthetic oligonucleotide
ucuccuccugccauaugcc

SEQ ID NO: 2397 - RNA, 19 nt, Artificial Sequence
  Description of Artificial Sequence: Synthetic oligonucleotide
cuccuccugccauaugccu

SEQ ID NO: 2398 - RNA, 19 nt, Artificial Sequence
  Description of Artificial Sequence: Synthetic oligonucleotide
uccuccugccauaugccuc

SEQ ID NO: 2399 - RNA, 19 nt, Artificial Sequence
  Description of Artificial Sequence: Synthetic oligonucleotide
ccuccugccauaugccucu

SEQ ID NO: 2400 - RNA, 19 nt, Artificial Sequence
  Description of Artificial Sequence: Synthetic oligonucleotide
cuccugccauaugccucuc

SEQ ID NO: 2401 - RNA, 19 nt, Artificial Sequence
  Description of Artificial Sequence: Synthetic oligonucleotide
uccugccauaugccucuca

SEQ ID NO: 2402 - RNA, 19 nt, Artificial Sequence
  Description of Artificial Sequence: Synthetic oligonucleotide
ccugccauaugccucucac

SEQ ID NO: 2403 - RNA, 19 nt, Artificial Sequence
  Description of Artificial Sequence: Synthetic oligonucleotide
cugccauaugccucucacg

SEQ ID NO: 2404 - RNA, 19 nt, Artificial Sequence
  Description of Artificial Sequence: Synthetic oligonucleotide
ugccauaugccucucacgg

SEQ ID NO: 2405 - RNA, 19 nt, Artificial Sequence
  Description of Artificial Sequence: Synthetic oligonucleotide
gccauaugccucucacggg

SEQ ID NO: 2406 - RNA, 19 nt, Artificial Sequence
  Description of Artificial Sequence: Synthetic oligonucleotide
ccauaugccucucacgggc

SEQ ID NO: 2407 - RNA, 19 nt, Artificial Sequence
  Description of Artificial Sequence: Synthetic oligonucleotide
cauaugccucucacgggcu

SEQ ID NO: 2408 - RNA, 19 nt, Artificial Sequence
  Description of Artificial Sequence: Synthetic oligonucleotide
auaugccucucacgggcua

SEQ ID NO: 2409 - RNA, 19 nt, Artificial Sequence
  Description of Artificial Sequence: Synthetic oligonucleotide
uaugccucucacgggcuau

SEQ ID NO: 2410 - RNA, 19 nt, Artificial Sequence
  Description of Artificial Sequence: Synthetic oligonucleotide
augccucucacgggcuaug

SEQ ID NO: 2411 - RNA, 19 nt, Artificial Sequence
  Description of Artificial Sequence: Synthetic oligonucleotide
ugccucucacgggcuauga

SEQ ID NO: 2412 - RNA, 19 nt, Artificial Sequence
  Description of Artificial Sequence: Synthetic oligonucleotide
gccucucacgggcuaugag

SEQ ID NO: 2413 - RNA, 19 nt, Artificial Sequence
  Description of Artificial Sequence: Synthetic oligonucleotide
ccucucacgggcuaugagg

SEQ ID NO: 2414 - RNA, 19 nt, Artificial Sequence
  Description of Artificial Sequence: Synthetic oligonucleotide
cucucacgggcuaugaggu

SEQ ID NO: 2415 - RNA, 19 nt, Artificial Sequence
  Description of Artificial Sequence: Synthetic oligonucleotide
ucucacgggcuaugaggua

SEQ ID NO: 2416 - RNA, 19 nt, Artificial Sequence
  Description of Artificial Sequence: Synthetic oligonucleotide
cucacgggcuaugagguau

SEQ ID NO: 2417 - RNA, 19 nt, Artificial Sequence
  Description of Artificial Sequence: Synthetic oligonucleotide
ucacgggcuaugagguaug

SEQ ID NO: 2418 - RNA, 19 nt, Artificial Sequence
  Description of Artificial Sequence: Synthetic oligonucleotide
cacgggcuaugagguaugg

SEQ ID NO: 2419 - RNA, 19 nt, Artificial Sequence
  Description of Artificial Sequence: Synthetic oligonucleotide
acgggcuaugagguauggu

SEQ ID NO: 2420 - RNA, 19 nt, Artificial Sequence
  Description of Artificial Sequence: Synthetic oligonucleotide
cgggcuaugagguaugguu

SEQ ID NO: 2421 - RNA, 19 nt, Artificial Sequence
  Description of Artificial Sequence: Synthetic oligonucleotide
gggcuaugagguaugguug

SEQ ID NO: 2422 - RNA, 19 nt, Artificial Sequence
  Description of Artificial Sequence: Synthetic oligonucleotide
ggcuaugagguaugguugg

SEQ ID NO: 2423 - RNA, 19 nt, Artificial Sequence
  Description of Artificial Sequence: Synthetic oligonucleotide
gcuaugagguaugguuggg

SEQ ID NO: 2424 - RNA, 19 nt, Artificial Sequence
  Description of Artificial Sequence: Synthetic oligonucleotide
cuaugagguaugguugggc

SEQ ID NO: 2425 - RNA, 19 nt, Artificial Sequence
  Description of Artificial Sequence: Synthetic oligonucleotide
uaugagguaugguugggca

SEQ ID NO: 2426 - RNA, 19 nt, Artificial Sequence
  Description of Artificial Sequence: Synthetic oligonucleotide
augagguaugguugggcac

SEQ ID NO: 2427 - RNA, 19 nt, Artificial Sequence
  Description of Artificial Sequence: Synthetic oligonucleotide
ugagguaugguugggcacc

SEQ ID NO: 2428 - RNA, 19 nt, Artificial Sequence
  Description of Artificial Sequence: Synthetic oligonucleotide
gagguaugguugggcaccc

SEQ ID NO: 2429 - RNA, 19 nt, Artificial Sequence
  Description of Artificial Sequence: Synthetic oligonucleotide
agguaugguugggcacccu

SEQ ID NO: 2430 - RNA, 19 nt, Artificial Sequence
  Description of Artificial Sequence: Synthetic oligonucleotide
gguaugguugggcacccug

SEQ ID NO: 2431 - RNA, 19 nt, Artificial Sequence
  Description of Artificial Sequence: Synthetic oligonucleotide
guaugguugggcacccugu

SEQ ID NO: 2432 - RNA, 19 nt, Artificial Sequence
  Description of Artificial Sequence: Synthetic oligonucleotide
uaugguugggcacccuguu

SEQ ID NO: 2433 - RNA, 19 nt, Artificial Sequence
  Description of Artificial Sequence: Synthetic oligonucleotide
augguugggcacccuguuc

SEQ ID NO: 2434 - RNA, 19 nt, Artificial Sequence
  Description of Artificial Sequence: Synthetic oligonucleotide
ugguugggcacccuguucc

SEQ ID NO: 2435 - RNA, 19 nt, Artificial Sequence
  Description of Artificial Sequence: Synthetic oligonucleotide
gguugggcacccuguucca

SEQ ID NO: 2436 - RNA, 19 nt, Artificial Sequence
  Description of Artificial Sequence: Synthetic oligonucleotide
guugggcacccuguuccag

SEQ ID NO: 2437 - RNA, 19 nt, Artificial Sequence
  Description of Artificial Sequence: Synthetic oligonucleotide
uugggcacccuguuccaga

SEQ ID NO: 2438 - RNA, 19 nt, Artificial Sequence
  Description of Artificial Sequence: Synthetic oligonucleotide
ugggcacccuguuccagaa

SEQ ID NO: 2439 - RNA, 19 nt, Artificial Sequence
  Description of Artificial Sequence: Synthetic oligonucleotide
gggcacccuguuccagaac

SEQ ID NO: 2440 - RNA, 19 nt, Artificial Sequence
  Description of Artificial Sequence: Synthetic oligonucleotide
ggcacccuguuccagaacc

SEQ ID NO: 2441 - RNA, 19 nt, Artificial Sequence
  Description of Artificial Sequence: Synthetic oligonucleotide
gcacccuguuccagaaccc

SEQ ID NO: 2442 - RNA, 19 nt, Artificial Sequence
  Description of Artificial Sequence: Synthetic oligonucleotide
cacccuguuccagaaccca

SEQ ID NO: 2443 - RNA, 19 nt, Artificial Sequence
  Description of Artificial Sequence: Synthetic oligonucleotide
acccuguuccagaacccac

SEQ ID NO: 2444 - RNA, 19 nt, Artificial Sequence
  Description of Artificial Sequence: Synthetic oligonucleotide
cccuguuccagaacccaca

SEQ ID NO: 2445 - RNA, 19 nt, Artificial Sequence
  Description of Artificial Sequence: Synthetic oligonucleotide
ccuguuccagaacccacag

SEQ ID NO: 2446 - RNA, 19 nt, Artificial Sequence
  Description of Artificial Sequence: Synthetic oligonucleotide
cuguuccagaacccacagc

SEQ ID NO: 2447 - RNA, 19 nt, Artificial Sequence
  Description of Artificial Sequence: Synthetic oligonucleotide
uguuccagaacccacagca

SEQ ID NO: 2448 - RNA, 19 nt, Artificial Sequence
  Description of Artificial Sequence: Synthetic oligonucleotide
guuccagaacccacagcau

SEQ ID NO: 2449 - RNA, 19 nt, Artificial Sequence
  Description of Artificial Sequence: Synthetic oligonucleotide
uuccagaacccacagcaug

SEQ ID NO: 2450 - RNA, 19 nt, Artificial Sequence
  Description of Artificial Sequence: Synthetic oligonucleotide
uccagaacccacagcaugg

SEQ ID NO: 2451 - RNA, 19 nt, Artificial Sequence
  Description of Artificial Sequence: Synthetic oligonucleotide
ccagaacccacagcaugga

SEQ ID NO: 2452 - RNA, 19 nt, Artificial Sequence
  Description of Artificial Sequence: Synthetic oligonucleotide
cagaacccacagcauggag

SEQ ID NO: 2453 - RNA, 19 nt, Artificial Sequence
  Description of Artificial Sequence: Synthetic oligonucleotide
agaacccacagcauggaga

SEQ ID NO: 2454 - RNA, 19 nt, Artificial Sequence
  Description of Artificial Sequence: Synthetic oligonucleotide
gaacccacagcauggagag

SEQ ID NO: 2455 - RNA, 19 nt, Artificial Sequence
  Description of Artificial Sequence: Synthetic oligonucleotide
aacccacagcauggagagc

SEQ ID NO: 2456 - RNA, 19 nt, Artificial Sequence
  Description of Artificial Sequence: Synthetic oligonucleotide
acccacagcauggagagcc

SEQ ID NO: 2457 - RNA, 19 nt, Artificial Sequence
  Description of Artificial Sequence: Synthetic oligonucleotide
cccacagcauggagagcca

SEQ ID NO: 2458 - RNA, 19 nt, Artificial Sequence
  Description of Artificial Sequence: Synthetic oligonucleotide
ccacagcauggagagccaa

SEQ ID NO: 2459 - RNA, 19 nt, Artificial Sequence
  Description of Artificial Sequence: Synthetic oligonucleotide
cacagcauggagagccaag

SEQ ID NO: 2460 - RNA, 19 nt, Artificial Sequence
  Description of Artificial Sequence: Synthetic oligonucleotide
acagcauggagagccaagc

SEQ ID NO: 2461 - RNA, 19 nt, Artificial Sequence
  Description of Artificial Sequence: Synthetic oligonucleotide
cagcauggagagccaagcc

SEQ ID NO: 2462 - RNA, 19 nt, Artificial Sequence
  Description of Artificial Sequence: Synthetic oligonucleotide
agcauggagagccaagccu

SEQ ID NO: 2463 - RNA, 19 nt, Artificial Sequence
  Description of Artificial Sequence: Synthetic oligonucleotide
gcauggagagccaagccua

SEQ ID NO: 2464 - RNA, 19 nt, Artificial Sequence
  Description of Artificial Sequence: Synthetic oligonucleotide
cauggagagccaagccuac

SEQ ID NO: 2465 - RNA, 19 nt, Artificial Sequence
  Description of Artificial Sequence: Synthetic oligonucleotide
auggagagccaagccuaca

SEQ ID NO: 2466 - RNA, 19 nt, Artificial Sequence
  Description of Artificial Sequence: Synthetic oligonucleotide
uggagagccaagccuacag

SEQ ID NO: 2467 - RNA, 19 nt, Artificial Sequence
  Description of Artificial Sequence: Synthetic oligonucleotide
ggagagccaagccuacagc

SEQ ID NO: 2468 - RNA, 19 nt, Artificial Sequence
  Description of Artificial Sequence: Synthetic oligonucleotide
gagagccaagccuacagcg

SEQ ID NO: 2469 - RNA, 19 nt, Artificial Sequence
  Description of Artificial Sequence: Synthetic oligonucleotide
agagccaagccuacagcgg

SEQ ID NO: 2470 - RNA, 19 nt, Artificial Sequence
  Description of Artificial Sequence: Synthetic oligonucleotide
gagccaagccuacagcggg

SEQ ID NO: 2471 - RNA, 19 nt, Artificial Sequence
  Description of Artificial Sequence: Synthetic oligonucleotide
agccaagccuacagcgggu

SEQ ID NO: 2472 - RNA, 19 nt, Artificial Sequence
  Description of Artificial Sequence: Synthetic oligonucleotide
gccaagccuacagcggguc

SEQ ID NO: 2473 - RNA, 19 nt, Artificial Sequence
  Description of Artificial Sequence: Synthetic oligonucleotide
ccaagccuacagcgggucc

SEQ ID NO: 2474 - RNA, 19 nt, Artificial Sequence
  Description of Artificial Sequence: Synthetic oligonucleotide
caagccuacagcggguccc

SEQ ID NO: 2475 - RNA, 19 nt, Artificial Sequence
  Description of Artificial Sequence: Synthetic oligonucleotide
aagccuacagcggguccca

SEQ ID NO: 2476 - RNA, 19 nt, Artificial Sequence
  Description of Artificial Sequence: Synthetic oligonucleotide
agccuacagcgggucccag

SEQ ID NO: 2477 - RNA, 19 nt, Artificial Sequence
  Description of Artificial Sequence: Synthetic oligonucleotide
gccuacagcgggucccagu

SEQ ID NO: 2478 - RNA, 19 nt, Artificial Sequence
  Description of Artificial Sequence: Synthetic oligonucleotide
ccuacagcgggucccagua

SEQ ID NO: 2479 - RNA, 19 nt, Artificial Sequence
  Description of Artificial Sequence: Synthetic oligonucleotide
cuacagcgggucccaguag

SEQ ID NO: 2480 - RNA, 19 nt, Artificial Sequence
  Description of Artificial Sequence: Synthetic oligonucleotide
uacagcgggucccaguagc

SEQ ID NO: 2481 - RNA, 19 nt, Artificial Sequence
  Description of Artificial Sequence: Synthetic oligonucleotide
acagcgggucccaguagcc

SEQ ID NO: 2482 - RNA, 19 nt, Artificial Sequence
  Description of Artificial Sequence: Synthetic oligonucleotide
cagcgggucccaguagcca

SEQ ID NO: 2483 - RNA, 19 nt, Artificial Sequence
  Description of Artificial Sequence: Synthetic oligonucleotide
agcgggucccaguagccaa

SEQ ID NO: 2484 - RNA, 19 nt, Artificial Sequence
  Description of Artificial Sequence: Synthetic oligonucleotide
gcgggucccaguagccaag

SEQ ID NO: 2485 - RNA, 19 nt, Artificial Sequence
  Description of Artificial Sequence: Synthetic oligonucleotide
cgggucccaguagccaaga

SEQ ID NO: 2486 - RNA, 19 nt, Artificial Sequence
  Description of Artificial Sequence: Synthetic oligonucleotide
gggucccaguagccaagau

SEQ ID NO: 2487 - RNA, 19 nt, Artificial Sequence
  Description of Artificial Sequence: Synthetic oligonucleotide
ggucccaguagccaagaug

SEQ ID NO: 2488 - RNA, 19 nt, Artificial Sequence
  Description of Artificial Sequence: Synthetic oligonucleotide
gucccaguagccaagaugg

SEQ ID NO: 2489 - RNA, 19 nt, Artificial Sequence
  Description of Artificial Sequence: Synthetic oligonucleotide
ucccaguagccaagauggu

SEQ ID NO: 2490 - RNA, 19 nt, Artificial Sequence
  Description of Artificial Sequence: Synthetic oligonucleotide
cccaguagccaagauggug

SEQ ID NO: 2491 - RNA, 19 nt, Artificial Sequence
  Description of Artificial Sequence: Synthetic oligonucleotide
ccaguagccaagauggugu

SEQ ID NO: 2492 - RNA, 19 nt, Artificial Sequence
  Description of Artificial Sequence: Synthetic oligonucleotide
caguagccaagauggugug

SEQ ID NO: 2493 - RNA, 19 nt, Artificial Sequence
  Description of Artificial Sequence: Synthetic oligonucleotide
aguagccaagauggugugu

SEQ ID NO: 2494 - RNA, 19 nt, Artificial Sequence
  Description of Artificial Sequence: Synthetic oligonucleotide
guagccaagauggugugug

SEQ ID NO: 2495 - RNA, 19 nt, Artificial Sequence
  Description of Artificial Sequence: Synthetic oligonucleotide
uagccaagauggugugugg

SEQ ID NO: 2496 - RNA, 19 nt, Artificial Sequence
  Description of Artificial Sequence: Synthetic oligonucleotide
agccaagaugguguguggg

SEQ ID NO: 2497 - RNA, 19 nt, Artificial Sequence
  Description of Artificial Sequence: Synthetic oligonucleotide
gccaagauggugugugggc

SEQ ID NO: 2498 - RNA, 19 nt, Artificial Sequence
  Description of Artificial Sequence: Synthetic oligonucleotide
ccaagauggugugugggcc

SEQ ID NO: 2499 - RNA, 19 nt, Artificial Sequence
  Description of Artificial Sequence: Synthetic oligonucleotide
caagauggugugugggccc

SEQ ID NO: 2500 - RNA, 19 nt, Artificial Sequence
  Description of Artificial Sequence: Synthetic oligonucleotide
aagauggugugugggcccu

SEQ ID NO: 2501 - RNA, 19 nt, Artificial Sequence
  Description of Artificial Sequence: Synthetic oligonucleotide
agauggugugugggcccuc

SEQ ID NO: 2502 - RNA, 19 nt, Artificial Sequence
  Description of Artificial Sequence: Synthetic oligonucleotide
gauggugugugggcccuca

SEQ ID NO: 2503 - RNA, 19 nt, Artificial Sequence
  Description of Artificial Sequence: Synthetic oligonucleotide
auggugugugggcccucag

SEQ ID NO: 2504 - RNA, 19 nt, Artificial Sequence
  Description of Artificial Sequence: Synthetic oligonucleotide
uggugugugggcccucagg

SEQ ID NO: 2505 - RNA, 19 nt, Artificial Sequence
  Description of Artificial Sequence: Synthetic oligonucleotide
ggugugugggcccucaggc

SEQ ID NO: 2506 - RNA, 19 nt, Artificial Sequence
  Description of Artificial Sequence: Synthetic oligonucleotide
gugugugggcccucaggcu

SEQ ID NO: 2507 - RNA, 19 nt, Artificial Sequence
  Description of Artificial Sequence: Synthetic oligonucleotide
ugugugggcccucaggcuc

SEQ ID NO: 2508 - RNA, 19 nt, Artificial Sequence
  Description of Artificial Sequence: Synthetic oligonucleotide
gugugggcccucaggcucc

SEQ ID NO: 2509 - RNA, 19 nt, Artificial Sequence
  Description of Artificial Sequence: Synthetic oligonucleotide
ugugggcccucaggcuccc

SEQ ID NO: 2510 - RNA, 19 nt, Artificial Sequence
  Description of Artificial Sequence: Synthetic oligonucleotide
gugggcccucaggcuccca

SEQ ID NO: 2511 - RNA, 19 nt, Artificial Sequence
  Description of Artificial Sequence: Synthetic oligonucleotide
ugggcccucaggcucccag

SEQ ID NO: 2512 - RNA, 19 nt, Artificial Sequence
  Description of Artificial Sequence: Synthetic oligonucleotide
gggcccucaggcucccagc

SEQ ID NO: 2513 - RNA, 19 nt, Artificial Sequence
  Description of Artificial Sequence: Synthetic oligonucleotide
ggcccucaggcucccagcu

SEQ ID NO: 2514 - RNA, 19 nt, Artificial Sequence
  Description of Artificial Sequence: Synthetic oligonucleotide
gcccucaggcucccagcuu

SEQ ID NO: 2515 - RNA, 19 nt, Artificial Sequence
  Description of Artificial Sequence: Synthetic oligonucleotide
cccucaggcucccagcuug

SEQ ID NO: 2516 - RNA, 19 nt, Artificial Sequence
  Description of Artificial Sequence: Synthetic oligonucleotide
ccucaggcucccagcuugu

SEQ ID NO: 2517 - RNA, 19 nt, Artificial Sequence
  Description of Artificial Sequence: Synthetic oligonucleotide
cucaggcucccagcuuguc

SEQ ID NO: 2518 - RNA, 19 nt, Artificial Sequence
  Description of Artificial Sequence: Synthetic oligonucleotide
ucaggcucccagcuugucc

SEQ ID NO: 2519 - RNA, 19 nt, Artificial Sequence
  Description of Artificial Sequence: Synthetic oligonucleotide
caggcucccagcuuguccu

SEQ ID NO: 2520 - RNA, 19 nt, Artificial Sequence
  Description of Artificial Sequence: Synthetic oligonucleotide
aggcucccagcuuguccug

SEQ ID NO: 2521 - RNA, 19 nt, Artificial Sequence
  Description of Artificial Sequence: Synthetic oligonucleotide
ggcucccagcuuguccugc

SEQ ID NO: 2522 - RNA, 19 nt, Artificial Sequence
  Description of Artificial Sequence: Synthetic oligonucleotide
gcucccagcuuguccugcu

SEQ ID NO: 2523 - RNA, 19 nt, Artificial Sequence
  Description of Artificial Sequence: Synthetic oligonucleotide
cucccagcuuguccugcuc

SEQ ID NO: 2524 - RNA, 19 nt, Artificial Sequence
  Description of Artificial Sequence: Synthetic oligonucleotide
ucccagcuuguccugcuca

SEQ ID NO: 2525 - RNA, 19 nt, Artificial Sequence
  Description of Artificial Sequence: Synthetic oligonucleotide
cccagcuuguccugcucaa

SEQ ID NO: 2526 - RNA, 19 nt, Artificial Sequence
  Description of Artificial Sequence: Synthetic oligonucleotide
ccagcuuguccugcucaag

SEQ ID NO: 2527 - RNA, 19 nt, Artificial Sequence
  Description of Artificial Sequence: Synthetic oligonucleotide
cagcuuguccugcucaagc

SEQ ID NO: 2528 - RNA, 19 nt, Artificial Sequence
  Description of Artificial Sequence: Synthetic oligonucleotide
agcuuguccugcucaagcu

SEQ ID NO: 2529 - RNA, 19 nt, Artificial Sequence
  Description of Artificial Sequence: Synthetic oligonucleotide
gcuuguccugcucaagcug

SEQ ID NO: 2530 - RNA, 19 nt, Artificial Sequence
  Description of Artificial Sequence: Synthetic oligonucleotide
cuuguccugcucaagcugg

SEQ ID NO: 2531 - RNA, 19 nt, Artificial Sequence
  Description of Artificial Sequence: Synthetic oligonucleotide
uuguccugcucaagcugga

SEQ ID NO: 2532 - RNA, 19 nt, Artificial Sequence
  Description of Artificial Sequence: Synthetic oligonucleotide
uguccugcucaagcuggag

SEQ ID NO: 2533 - RNA, 19 nt, Artificial Sequence
  Description of Artificial Sequence: Synthetic oligonucleotide
guccugcucaagcuggaga

SEQ ID NO: 2534 - RNA, 19 nt, Artificial Sequence
  Description of Artificial Sequence: Synthetic oligonucleotide
uccugcucaagcuggagag

SEQ ID NO: 2535 - RNA, 19 nt, Artificial Sequence
  Description of Artificial Sequence: Synthetic oligonucleotide
ccugcucaagcuggagaga

SEQ ID NO: 2536 - RNA, 19 nt, Artificial Sequence
  Description of Artificial Sequence: Synthetic oligonucleotide
cugcucaagcuggagagau

SEQ ID NO: 2537 - RNA, 19 nt, Artificial Sequence
  Description of Artificial Sequence: Synthetic oligonucleotide
ugcucaagcuggagagauc

SEQ ID NO: 2538 - RNA, 19 nt, Artificial Sequence
  Description of Artificial Sequence: Synthetic oligonucleotide
gcucaagcuggagagaucu

SEQ ID NO: 2539 - RNA, 19 nt, Artificial Sequence
  Description of Artificial Sequence: Synthetic oligonucleotide
cucaagcuggagagaucug

SEQ ID NO: 2540 - RNA, 19 nt, Artificial Sequence
  Description of Artificial Sequence: Synthetic oligonucleotide
ucaagcuggagagaucugu

SEQ ID NO: 2541 - RNA, 19 nt, Artificial Sequence
  Description of Artificial Sequence: Synthetic oligonucleotide
caagcuggagagaucugug

SEQ ID NO: 2542 - RNA, 19 nt, Artificial Sequence
  Description of Artificial Sequence: Synthetic oligonucleotide
aagcuggagagaucuguga

SEQ ID NO: 2543 - RNA, 19 nt, Artificial Sequence
  Description of Artificial Sequence: Synthetic oligonucleotide
agcuggagagaucugugac

SEQ ID NO: 2544 - RNA, 19 nt, Artificial Sequence
  Description of Artificial Sequence: Synthetic oligonucleotide
gcuggagagaucugugacc

SEQ ID NO: 2545 - RNA, 19 nt, Artificial Sequence
  Description of Artificial Sequence: Synthetic oligonucleotide
cuggagagaucugugaccc

SEQ ID NO: 2546 - RNA, 19 nt, Artificial Sequence
  Description of Artificial Sequence: Synthetic oligonucleotide
uggagagaucugugacccu

SEQ ID NO: 2547 - RNA, 19 nt, Artificial Sequence
  Description of Artificial Sequence: Synthetic oligonucleotide
ggagagaucugugacccug

SEQ ID NO: 2548 - RNA, 19 nt, Artificial Sequence
  Description of Artificial Sequence: Synthetic oligonucleotide
gagagaucugugacccuga

SEQ ID NO: 2549 - RNA, 19 nt, Artificial Sequence
  Description of Artificial Sequence: Synthetic oligonucleotide
agagaucugugacccugaa

SEQ ID NO: 2550 - RNA, 19 nt, Artificial Sequence
  Description of Artificial Sequence: Synthetic oligonucleotide
gagaucugugacccugaac

SEQ ID NO: 2551 - RNA, 19 nt, Artificial Sequence
  Description of Artificial Sequence: Synthetic oligonucleotide
agaucugugacccugaacc

SEQ ID NO: 2552 - RNA, 19 nt, Artificial Sequence
  Description of Artificial Sequence: Synthetic oligonucleotide
gaucugugacccugaacca

SEQ ID NO: 2553 - RNA, 19 nt, Artificial Sequence
  Description of Artificial Sequence: Synthetic oligonucleotide
aucugugacccugaaccag

SEQ ID NO: 2554 - RNA, 19 nt, Artificial Sequence
  Description of Artificial Sequence: Synthetic oligonucleotide
ucugugacccugaaccagc

SEQ ID NO: 2555 - RNA, 19 nt, Artificial Sequence
  Description of Artificial Sequence: Synthetic oligonucleotide
cugugacccugaaccagcg

SEQ ID NO: 2556 - RNA, 19 nt, Artificial Sequence
  Description of Artificial Sequence: Synthetic oligonucleotide
ugugacccugaaccagcgu

SEQ ID NO: 2557 - RNA, 19 nt, Artificial Sequence
  Description of Artificial Sequence: Synthetic oligonucleotide
gugacccugaaccagcgug

SEQ ID NO: 2558 - RNA, 19 nt, Artificial Sequence
  Description of Artificial Sequence: Synthetic oligonucleotide
ugacccugaaccagcgugu

SEQ ID NO: 2559 - RNA, 19 nt, Artificial Sequence
  Description of Artificial Sequence: Synthetic oligonucleotide
gacccugaaccagcgugug

SEQ ID NO: 2560 - RNA, 19 nt, Artificial Sequence
  Description of Artificial Sequence: Synthetic oligonucleotide
acccugaaccagcgugugg

SEQ ID NO: 2561 - RNA, 19 nt, Artificial Sequence
  Description of Artificial Sequence: Synthetic oligonucleotide
cccugaaccagcguguggc

SEQ ID NO: 2562 - RNA, 19 nt, Artificial Sequence
  Description of Artificial Sequence: Synthetic oligonucleotide
ccugaaccagcguguggcc

SEQ ID NO: 2563 - RNA, 19 nt, Artificial Sequence
  Description of Artificial Sequence: Synthetic oligonucleotide
cugaaccagcguguggccc

SEQ ID NO: 2564 - RNA, 19 nt, Artificial Sequence
  Description of Artificial Sequence: Synthetic oligonucleotide
ugaaccagcguguggcccu

SEQ ID NO: 2565 - RNA, 19 nt, Artificial Sequence
  Description of Artificial Sequence: Synthetic oligonucleotide
gaaccagcguguggcccug

SEQ ID NO: 2566 - RNA, 19 nt, Artificial Sequence
  Description of Artificial Sequence: Synthetic oligonucleotide
aaccagcguguggcccuga

SEQ ID NO: 2567 - RNA, 19 nt, Artificial Sequence
  Description of Artificial Sequence: Synthetic oligonucleotide
accagcguguggcccugau

SEQ ID NO: 2568 - RNA, 19 nt, Artificial Sequence
  Description of Artificial Sequence: Synthetic oligonucleotide
ccagcguguggcccugauc

SEQ ID NO: 2569 - RNA, 19 nt, Artificial Sequence
  Description of Artificial Sequence: Synthetic oligonucleotide
cagcguguggcccugaucu

SEQ ID NO: 2570 - RNA, 19 nt, Artificial Sequence
  Description of Artificial Sequence: Synthetic oligonucleotide
agcguguggcccugaucug

SEQ ID NO: 2571 - RNA, 19 nt, Artificial Sequence
  Description of Artificial Sequence: Synthetic oligonucleotide
gcguguggcccugaucugc

SEQ ID NO: 2572 - RNA, 19 nt, Artificial Sequence
  Description of Artificial Sequence: Synthetic oligonucleotide
cguguggcccugaucugcc

SEQ ID NO: 2573 - RNA, 19 nt, Artificial Sequence
  Description of Artificial Sequence: Synthetic oligonucleotide
guguggcccugaucugccu

SEQ ID NO: 2574 - RNA, 19 nt, Artificial Sequence
  Description of Artificial Sequence: Synthetic oligonucleotide
uguggcccugaucugccug

SEQ ID NO: 2575 - RNA, 19 nt, Artificial Sequence
  Description of Artificial Sequence: Synthetic oligonucleotide
guggcccugaucugccugc

SEQ ID NO: 2576 - RNA, 19 nt, Artificial Sequence
  Description of Artificial Sequence: Synthetic oligonucleotide
uggcccugaucugccugcc

SEQ ID NO: 2577 - RNA, 19 nt, Artificial Sequence
  Description of Artificial Sequence: Synthetic oligonucleotide
ggcccugaucugccugccc

SEQ ID NO: 2578 - RNA, 19 nt, Artificial Sequence
  Description of Artificial Sequence: Synthetic oligonucleotide
gcccugaucugccugcccc

SEQ ID NO: 2579 - RNA, 19 nt, Artificial Sequence
  Description of Artificial Sequence: Synthetic oligonucleotide
cccugaucugccugccccc

SEQ ID NO: 2580 - RNA, 19 nt, Artificial Sequence
  Description of Artificial Sequence: Synthetic oligonucleotide
ccugaucugccugcccccu

SEQ ID NO: 2581 - RNA, 19 nt, Artificial Sequence
  Description of Artificial Sequence: Synthetic oligonucleotide
cugaucugccugcccccug

SEQ ID NO: 2582 - RNA, 19 nt, Artificial Sequence
  Description of Artificial Sequence: Synthetic oligonucleotide
ugaucugccugcccccuga

SEQ ID NO: 2583 - RNA, 19 nt, Artificial Sequence
  Description of Artificial Sequence: Synthetic oligonucleotide
gaucugccugcccccugaa

SEQ ID NO: 2584 - RNA, 19 nt, Artificial Sequence
  Description of Artificial Sequence: Synthetic oligonucleotide
aucugccugcccccugaau

SEQ ID NO: 2585 - RNA, 19 nt, Artificial Sequence
  Description of Artificial Sequence: Synthetic oligonucleotide
ucugccugcccccugaaug

SEQ ID NO: 2586 - RNA, 19 nt, Artificial Sequence
  Description of Artificial Sequence: Synthetic oligonucleotide
cugccugcccccugaaugg

SEQ ID NO: 2587 - RNA, 19 nt, Artificial Sequence
  Description of Artificial Sequence: Synthetic oligonucleotide
ugccugcccccugaauggu

SEQ ID NO: 2588 - RNA, 19 nt, Artificial Sequence
  Description of Artificial Sequence: Synthetic oligonucleotide
gccugcccccugaauggua

SEQ ID NO: 2589 - RNA, 19 nt, Artificial Sequence
  Description of Artificial Sequence: Synthetic oligonucleotide
ccugcccccugaaugguau

SEQ ID NO: 2590 - RNA, 19 nt, Artificial Sequence
  Description of Artificial Sequence: Synthetic oligonucleotide
cugcccccugaaugguaug

SEQ ID NO: 2591 - RNA, 19 nt, Artificial Sequence
  Description of Artificial Sequence: Synthetic oligonucleotide
ugcccccugaaugguaugu

SEQ ID NO: 2592 - RNA, 19 nt, Artificial Sequence
  Description of Artificial Sequence: Synthetic oligonucleotide
gcccccugaaugguaugug

SEQ ID NO: 2593 - RNA, 19 nt, Artificial Sequence
  Description of Artificial Sequence: Synthetic oligonucleotide
cccccugaaugguaugugg

SEQ ID NO: 2594 - RNA, 19 nt, Artificial Sequence
  Description of Artificial Sequence: Synthetic oligonucleotide
ccccugaaugguauguggu

SEQ ID NO: 2595 - RNA, 19 nt, Artificial Sequence
  Description of Artificial Sequence: Synthetic oligonucleotide
cccugaaugguauguggug

SEQ ID NO: 2596 - RNA, 19 nt, Artificial Sequence
  Description of Artificial Sequence: Synthetic oligonucleotide
ccugaaugguauguggugc

SEQ ID NO: 2597 - RNA, 19 nt, Artificial Sequence
  Description of Artificial Sequence: Synthetic oligonucleotide
cugaaugguauguggugcc

SEQ ID NO: 2598 - RNA, 19 nt, Artificial Sequence
  Description of Artificial Sequence: Synthetic oligonucleotide
ugaaugguauguggugccu

SEQ ID NO: 2599 - RNA, 19 nt, Artificial Sequence
  Description of Artificial Sequence: Synthetic oligonucleotide
gaaugguauguggugccuc

SEQ ID NO: 2600 - RNA, 19 nt, Artificial Sequence
  Description of Artificial Sequence: Synthetic oligonucleotide
aaugguauguggugccucc

SEQ ID NO: 2601 - RNA, 19 nt, Artificial Sequence
  Description of Artificial Sequence: Synthetic oligonucleotide
augguauguggugccucca

SEQ ID NO: 2602 - RNA, 19 nt, Artificial Sequence
  Description of Artificial Sequence: Synthetic oligonucleotide
ugguauguggugccuccag

SEQ ID NO: 2603 - RNA, 19 nt, Artificial Sequence
  Description of Artificial Sequence: Synthetic oligonucleotide
gguauguggugccuccagg

SEQ ID NO: 2604 - RNA, 19 nt, Artificial Sequence
  Description of Artificial Sequence: Synthetic oligonucleotide
guauguggugccuccaggg

SEQ ID NO: 2605 - RNA, 19 nt, Artificial Sequence
  Description of Artificial Sequence: Synthetic oligonucleotide
uauguggugccuccaggga

SEQ ID NO: 2606 - RNA, 19 nt, Artificial Sequence
  Description of Artificial Sequence: Synthetic oligonucleotide
auguggugccuccagggac

SEQ ID NO: 2607 - RNA, 19 nt, Artificial Sequence
  Description of Artificial Sequence: Synthetic oligonucleotide
uguggugccuccagggacc

SEQ ID NO: 2608 - RNA, 19 nt, Artificial Sequence
  Description of Artificial Sequence: Synthetic oligonucleotide
guggugccuccagggacca

SEQ ID NO: 2609 - RNA, 19 nt, Artificial Sequence
  Description of Artificial Sequence: Synthetic oligonucleotide
uggugccuccagggaccaa

SEQ ID NO: 2610 - RNA, 19 nt, Artificial Sequence
  Description of Artificial Sequence: Synthetic oligonucleotide
ggugccuccagggaccaag

SEQ ID NO: 2611 - RNA, 19 nt, Artificial Sequence
  Description of Artificial Sequence: Synthetic oligonucleotide
gugccuccagggaccaagu

SEQ ID NO: 2612 - RNA, 19 nt, Artificial Sequence
  Description of Artificial Sequence: Synthetic oligonucleotide
ugccuccagggaccaagug

SEQ ID NO: 2613 - RNA, 19 nt, Artificial Sequence
  Description of Artificial Sequence: Synthetic oligonucleotide
gccuccagggaccaagugu

SEQ ID NO: 2614 - RNA, 19 nt, Artificial Sequence
  Description of Artificial Sequence: Synthetic oligonucleotide
ccuccagggaccaagugug

SEQ ID NO: 2615 - RNA, 19 nt, Artificial Sequence
  Description of Artificial Sequence: Synthetic oligonucleotide
cuccagggaccaaguguga

SEQ ID NO: 2616 - RNA, 19 nt, Artificial Sequence
  Description of Artificial Sequence: Synthetic oligonucleotide
uccagggaccaagugugag

SEQ ID NO: 2617 - RNA, 19 nt, Artificial Sequence
  Description of Artificial Sequence: Synthetic oligonucleotide
ccagggaccaagugugaga

SEQ ID NO: 2618 - RNA, 19 nt, Artificial Sequence
  Description of Artificial Sequence: Synthetic oligonucleotide
cagggaccaagugugagau

SEQ ID NO: 2619 - RNA, 19 nt, Artificial Sequence
  Description of Artificial Sequence: Synthetic oligonucleotide
agggaccaagugugagauu

SEQ ID NO: 2620 - RNA, 19 nt, Artificial Sequence
  Description of Artificial Sequence: Synthetic oligonucleotide
gggaccaagugugagauug

SEQ ID NO: 2621 - RNA, 19 nt, Artificial Sequence
  Description of Artificial Sequence: Synthetic oligonucleotide
ggaccaagugugagauugc

SEQ ID NO: 2622 - RNA, 19 nt, Artificial Sequence
  Description of Artificial Sequence: Synthetic oligonucleotide
gaccaagugugagauugca

SEQ ID NO: 2623 - RNA, 19 nt, Artificial Sequence
  Description of Artificial Sequence: Synthetic oligonucleotide
accaagugugagauugcag

SEQ ID NO: 2624 - RNA, 19 nt, Artificial Sequence
  Description of Artificial Sequence: Synthetic oligonucleotide
ccaagugugagauugcagg

SEQ ID NO: 2625 - RNA, 19 nt, Artificial Sequence
  Description of Artificial Sequence: Synthetic oligonucleotide
caagugugagauugcaggc

SEQ ID NO: 2626 - RNA, 19 nt, Artificial Sequence
  Description of Artificial Sequence: Synthetic oligonucleotide
aagugugagauugcaggcu

SEQ ID NO: 2627 - RNA, 19 nt, Artificial Sequence
  Description of Artificial Sequence: Synthetic oligonucleotide
agugugagauugcaggcug

SEQ ID NO: 2628 - RNA, 19 nt, Artificial Sequence
  Description of Artificial Sequence: Synthetic oligonucleotide
gugugagauugcaggcugg

SEQ ID NO: 2629 - RNA, 19 nt, Artificial Sequence
  Description of Artificial Sequence: Synthetic oligonucleotide
ugugagauugcaggcuggg

SEQ ID NO: 2630 - RNA, 19 nt, Artificial Sequence
  Description of Artificial Sequence: Synthetic oligonucleotide
gugagauugcaggcugggg

SEQ ID NO: 2631 - RNA, 19 nt, Artificial Sequence
  Description of Artificial Sequence: Synthetic oligonucleotide
ugagauugcaggcuggggu

SEQ ID NO: 2632 - RNA, 19 nt, Artificial Sequence
  Description of Artificial Sequence: Synthetic oligonucleotide
gagauugcaggcuggggug

SEQ ID NO: 2633 - RNA, 19 nt, Artificial Sequence
  Description of Artificial Sequence: Synthetic oligonucleotide
agauugcaggcugggguga

SEQ ID NO: 2634 - RNA, 19 nt, Artificial Sequence
  Description of Artificial Sequence: Synthetic oligonucleotide
gauugcaggcuggggugag

SEQ ID NO: 2635 - RNA, 19 nt, Artificial Sequence
  Description of Artificial Sequence: Synthetic oligonucleotide
auugcaggcuggggugaga

SEQ ID NO: 2636 - RNA, 19 nt, Artificial Sequence
  Description of Artificial Sequence: Synthetic oligonucleotide
uugcaggcuggggugagac

SEQ ID NO: 2637 - RNA, 19 nt, Artificial Sequence
  Description of Artificial Sequence: Synthetic oligonucleotide
ugcaggcuggggugagacc

SEQ ID NO: 2638 - RNA, 19 nt, Artificial Sequence
  Description of Artificial Sequence: Synthetic oligonucleotide
gcaggcuggggugagacca

SEQ ID NO: 2639 - RNA, 19 nt, Artificial Sequence
  Description of Artificial Sequence: Synthetic oligonucleotide
caggcuggggugagaccaa

SEQ ID NO: 2640 - RNA, 19 nt, Artificial Sequence
  Description of Artificial Sequence: Synthetic oligonucleotide
aggcuggggugagaccaaa

SEQ ID NO: 2641 - RNA, 19 nt, Artificial Sequence
  Description of Artificial Sequence: Synthetic oligonucleotide
ggcuggggugagaccaaag

SEQ ID NO: 2642 - RNA, 19 nt, Artificial Sequence
  Description of Artificial Sequence: Synthetic oligonucleotide
gcuggggugagaccaaagg

SEQ ID NO: 2643 - RNA, 19 nt, Artificial Sequence
  Description of Artificial Sequence: Synthetic oligonucleotide
cuggggugagaccaaaggu

SEQ ID NO: 2644 - RNA, 19 nt, Artificial Sequence
  Description of Artificial Sequence: Synthetic oligonucleotide
uggggugagaccaaaggua

SEQ ID NO: 2645 - RNA, 19 nt, Artificial Sequence
  Description of Artificial Sequence: Synthetic oligonucleotide
ggggugagaccaaagguac

SEQ ID NO: 2646 - RNA, 19 nt, Artificial Sequence
  Description of Artificial Sequence: Synthetic oligonucleotide
gggugagaccaaagguacg

SEQ ID NO: 2647 - RNA, 19 nt, Artificial Sequence
  Description of Artificial Sequence: Synthetic oligonucleotide
ggugagaccaaagguacgg

SEQ ID NO: 2648 - RNA, 19 nt, Artificial Sequence
  Description of Artificial Sequence: Synthetic oligonucleotide
gugagaccaaagguacggg

SEQ ID NO: 2649 - RNA, 19 nt, Artificial Sequence
  Description of Artificial Sequence: Synthetic oligonucleotide
ugagaccaaagguacgggu

SEQ ID NO: 2650 - RNA, 19 nt, Artificial Sequence
  Description of Artificial Sequence: Synthetic oligonucleotide
gagaccaaagguacgggua

SEQ ID NO: 2651 - RNA, 19 nt, Artificial Sequence
  Description of Artificial Sequence: Synthetic oligonucleotide
agaccaaagguacggguaa

SEQ ID NO: 2652 - RNA, 19 nt, Artificial Sequence
  Description of Artificial Sequence: Synthetic oligonucleotide
gaccaaagguacggguaau

SEQ ID NO: 2653 - RNA, 19 nt, Artificial Sequence
  Description of Artificial Sequence: Synthetic oligonucleotide
accaaagguacggguaaug

SEQ ID NO: 2654 - RNA, 19 nt, Artificial Sequence
  Description of Artificial Sequence: Synthetic oligonucleotide
ccaaagguacggguaauga

SEQ ID NO: 2655 - RNA, 19 nt, Artificial Sequence
  Description of Artificial Sequence: Synthetic oligonucleotide
caaagguacggguaaugac

SEQ ID NO: 2656 - RNA, 19 nt, Artificial Sequence
  Description of Artificial Sequence: Synthetic oligonucleotide
aaagguacggguaaugaca

SEQ ID NO: 2657 - RNA, 19 nt, Artificial Sequence
  Description of Artificial Sequence: Synthetic oligonucleotide
aagguacggguaaugacac

SEQ ID NO: 2658 - RNA, 19 nt, Artificial Sequence
  Description of Artificial Sequence: Synthetic oligonucleotide
agguacggguaaugacaca

SEQ ID NO: 2659 - RNA, 19 nt, Artificial Sequence
  Description of Artificial Sequence: Synthetic oligonucleotide
gguacggguaaugacacag

SEQ ID NO: 2660 - RNA, 19 nt, Artificial Sequence
  Description of Artificial Sequence: Synthetic oligonucleotide
guacggguaaugacacagu

SEQ ID NO: 2661 - RNA, 19 nt, Artificial Sequence
  Description of Artificial Sequence: Synthetic oligonucleotide
uacggguaaugacacaguc

SEQ ID NO: 2662 - RNA, 19 nt, Artificial Sequence
  Description of Artificial Sequence: Synthetic oligonucleotide
acggguaaugacacagucc

SEQ ID NO: 2663 - RNA, 19 nt, Artificial Sequence
  Description of Artificial Sequence: Synthetic oligonucleotide
cggguaaugacacaguccu

SEQ ID NO: 2664 - RNA, 19 nt, Artificial Sequence
  Description of Artificial Sequence: Synthetic oligonucleotide
ggguaaugacacaguccua

SEQ ID NO: 2665 - RNA, 19 nt, Artificial Sequence
  Description of Artificial Sequence: Synthetic oligonucleotide
gguaaugacacaguccuaa

SEQ ID NO: 2666 - RNA, 19 nt, Artificial Sequence
  Description of Artificial Sequence: Synthetic oligonucleotide
guaaugacacaguccuaaa

SEQ ID NO: 2667 - RNA, 19 nt, Artificial Sequence
  Description of Artificial Sequence: Synthetic oligonucleotide
uaaugacacaguccuaaau

SEQ ID NO: 2668 - RNA, 19 nt, Artificial Sequence
  Description of Artificial Sequence: Synthetic oligonucleotide
aaugacacaguccuaaaug

SEQ ID NO: 2669 - RNA, 19 nt, Artificial Sequence
  Description of Artificial Sequence: Synthetic oligonucleotide
augacacaguccuaaaugu

SEQ ID NO: 2670 - RNA, 19 nt, Artificial Sequence
  Description of Artificial Sequence: Synthetic oligonucleotide
ugacacaguccuaaaugug

SEQ ID NO: 2671 - RNA, 19 nt, Artificial Sequence
  Description of Artificial Sequence: Synthetic oligonucleotide
gacacaguccuaaaugugg

SEQ ID NO: 2672 - RNA, 19 nt, Artificial Sequence
  Description of Artificial Sequence: Synthetic oligonucleotide
acacaguccuaaauguggc

SEQ ID NO: 2673 - RNA, 19 nt, Artificial Sequence
  Description of Artificial Sequence: Synthetic oligonucleotide
cacaguccuaaauguggcc

SEQ ID NO: 2674 - RNA, 19 nt, Artificial Sequence
  Description of Artificial Sequence: Synthetic oligonucleotide
acaguccuaaauguggccu

SEQ ID NO: 2675 - RNA, 19 nt, Artificial Sequence
  Description of Artificial Sequence: Synthetic oligonucleotide
caguccuaaauguggccuu

SEQ ID NO: 2676 - RNA, 19 nt, Artificial Sequence
  Description of Artificial Sequence: Synthetic oligonucleotide
aguccuaaauguggccuug

SEQ ID NO: 2677 - RNA, 19 nt, Artificial Sequence
  Description of Artificial Sequence: Synthetic oligonucleotide
guccuaaauguggccuugc

SEQ ID NO: 2678 - RNA, 19 nt, Artificial Sequence
  Description of Artificial Sequence: Synthetic oligonucleotide
uccuaaauguggccuugcu

SEQ ID NO: 2679 - RNA, 19 nt, Artificial Sequence
  Description of Artificial Sequence: Synthetic oligonucleotide
ccuaaauguggccuugcug

SEQ ID NO: 2680 - RNA, 19 nt, Artificial Sequence
  Description of Artificial Sequence: Synthetic oligonucleotide
cuaaauguggccuugcuga

SEQ ID NO: 2681 - RNA, 19 nt, Artificial Sequence
  Description of Artificial Sequence: Synthetic oligonucleotide
uaaauguggccuugcugaa

SEQ ID NO: 2682 - RNA, 19 nt, Artificial Sequence
  Description of Artificial Sequence: Synthetic oligonucleotide
aaauguggccuugcugaau

SEQ ID NO: 2683 - RNA, 19 nt, Artificial Sequence
  Description of Artificial Sequence: Synthetic oligonucleotide
aauguggccuugcugaaug

SEQ ID NO: 2684 - RNA, 19 nt, Artificial Sequence
  Description of Artificial Sequence: Synthetic oligonucleotide
auguggccuugcugaaugu

SEQ ID NO: 2685 - RNA, 19 nt, Artificial Sequence
  Description of Artificial Sequence: Synthetic oligonucleotide
uguggccuugcugaauguc

SEQ ID NO: 2686 - RNA, 19 nt, Artificial Sequence
  Description of Artificial Sequence: Synthetic oligonucleotide
guggccuugcugaauguca

SEQ ID NO: 2687 - RNA, 19 nt, Artificial Sequence
  Description of Artificial Sequence: Synthetic oligonucleotide
uggccuugcugaaugucau

SEQ ID NO: 2688 - RNA, 19 nt, Artificial Sequence
  Description of Artificial Sequence: Synthetic oligonucleotide
ggccuugcugaaugucauc

SEQ ID NO: 2689 - RNA, 19 nt, Artificial Sequence
  Description of Artificial Sequence: Synthetic oligonucleotide
gccuugcugaaugucaucu

SEQ ID NO: 2690 - RNA, 19 nt, Artificial Sequence
  Description of Artificial Sequence: Synthetic oligonucleotide
ccuugcugaaugucaucuc

SEQ ID NO: 2691 - RNA, 19 nt, Artificial Sequence
  Description of Artificial Sequence: Synthetic oligonucleotide
cuugcugaaugucaucucc

SEQ ID NO: 2692 - RNA, 19 nt, Artificial Sequence
  Description of Artificial Sequence: Synthetic oligonucleotide
uugcugaaugucaucucca

SEQ ID NO: 2693 - RNA, 19 nt, Artificial Sequence
  Description of Artificial Sequence: Synthetic oligonucleotide
ugcugaaugucaucuccaa

SEQ ID NO: 2694 - RNA, 19 nt, Artificial Sequence
  Description of Artificial Sequence: Synthetic oligonucleotide
gcugaaugucaucuccaac

SEQ ID NO: 2695 - RNA, 19 nt, Artificial Sequence
  Description of Artificial Sequence: Synthetic oligonucleotide
cugaaugucaucuccaacc

SEQ ID NO: 2696 - RNA, 19 nt, Artificial Sequence
  Description of Artificial Sequence: Synthetic oligonucleotide
ugaaugucaucuccaacca

SEQ ID NO: 2697 - RNA, 19 nt, Artificial Sequence
  Description of Artificial Sequence: Synthetic oligonucleotide
gaaugucaucuccaaccag

SEQ ID NO: 2698 - RNA, 19 nt, Artificial Sequence
  Description of Artificial Sequence: Synthetic oligonucleotide
aaugucaucuccaaccagg

SEQ ID NO: 2699 - RNA, 19 nt, Artificial Sequence
  Description of Artificial Sequence: Synthetic oligonucleotide
augucaucuccaaccagga

SEQ ID NO: 2700 - RNA, 19 nt, Artificial Sequence
  Description of Artificial Sequence: Synthetic oligonucleotide
ugucaucuccaaccaggag

SEQ ID NO: 2701 - RNA, 19 nt, Artificial Sequence
  Description of Artificial Sequence: Synthetic oligonucleotide
gucaucuccaaccaggagu

SEQ ID NO: 2702 - RNA, 19 nt, Artificial Sequence
  Description of Artificial Sequence: Synthetic oligonucleotide
ucaucuccaaccaggagug

SEQ ID NO: 2703 - RNA, 19 nt, Artificial Sequence
  Description of Artificial Sequence: Synthetic oligonucleotide
caucuccaaccaggagugu

SEQ ID NO: 2704 - RNA, 19 nt, Artificial Sequence
  Description of Artificial Sequence: Synthetic oligonucleotide
aucuccaaccaggagugua

SEQ ID NO: 2705 - RNA, 19 nt, Artificial Sequence
  Description of Artificial Sequence: Synthetic oligonucleotide
ucuccaaccaggaguguaa

SEQ ID NO: 2706 - RNA, 19 nt, Artificial Sequence
  Description of Artificial Sequence: Synthetic oligonucleotide
cuccaaccaggaguguaac

SEQ ID NO: 2707 - RNA, 19 nt, Artificial Sequence
  Description of Artificial Sequence: Synthetic oligonucleotide
uccaaccaggaguguaaca

SEQ ID NO: 2708 - RNA, 19 nt, Artificial Sequence
  Description of Artificial Sequence: Synthetic oligonucleotide
ccaaccaggaguguaacau

SEQ ID NO: 2709 - RNA, 19 nt, Artificial Sequence
  Description of Artificial Sequence: Synthetic oligonucleotide
caaccaggaguguaacauc

SEQ ID NO: 2710 - RNA, 19 nt, Artificial Sequence
  Description of Artificial Sequence: Synthetic oligonucleotide
aaccaggaguguaacauca

SEQ ID NO: 2711 - RNA, 19 nt, Artificial Sequence
  Description of Artificial Sequence: Synthetic oligonucleotide
accaggaguguaacaucaa

SEQ ID NO: 2712 - RNA, 19 nt, Artificial Sequence
  Description of Artificial Sequence: Synthetic oligonucleotide
ccaggaguguaacaucaag

SEQ ID NO: 2713 - RNA, 19 nt, Artificial Sequence
  Description of Artificial Sequence: Synthetic oligonucleotide
caggaguguaacaucaagc

SEQ ID NO: 2714 - RNA, 19 nt, Artificial Sequence
  Description of Artificial Sequence: Synthetic oligonucleotide
aggaguguaacaucaagca

SEQ ID NO: 2715 - RNA, 19 nt, Artificial Sequence
  Description of Artificial Sequence: Synthetic oligonucleotide
ggaguguaacaucaagcac

SEQ ID NO: 2716 - RNA, 19 nt, Artificial Sequence
  Description of Artificial Sequence: Synthetic oligonucleotide
gaguguaacaucaagcacc

SEQ ID NO: 2717 - RNA, 19 nt, Artificial Sequence
  Description of Artificial Sequence: Synthetic oligonucleotide
aguguaacaucaagcaccg

SEQ ID NO: 2718 - RNA, 19 nt, Artificial Sequence
  Description of Artificial Sequence: Synthetic oligonucleotide
guguaacaucaagcaccga

SEQ ID NO: 2719 - RNA, 19 nt, Artificial Sequence
  Description of Artificial Sequence: Synthetic oligonucleotide
uguaacaucaagcaccgag

SEQ ID NO: 2720 - RNA, 19 nt, Artificial Sequence
  Description of Artificial Sequence: Synthetic oligonucleotide
guaacaucaagcaccgagg

SEQ ID NO: 2721 - RNA, 19 nt, Artificial Sequence
  Description of Artificial Sequence: Synthetic oligonucleotide
uaacaucaagcaccgagga

SEQ ID NO: 2722 - RNA, 19 nt, Artificial Sequence
  Description of Artificial Sequence: Synthetic oligonucleotide
aacaucaagcaccgaggac

SEQ ID NO: 2723 - RNA, 19 nt, Artificial Sequence
  Description of Artificial Sequence: Synthetic oligonucleotide
acaucaagcaccgaggacg

SEQ ID NO: 2724 - RNA, 19 nt, Artificial Sequence
  Description of Artificial Sequence: Synthetic oligonucleotide
caucaagcaccgaggacgu

SEQ ID NO: 2725 - RNA, 19 nt, Artificial Sequence
  Description of Artificial Sequence: Synthetic oligonucleotide
aucaagcaccgaggacgug

SEQ ID NO: 2726 - RNA, 19 nt, Artificial Sequence
  Description of Artificial Sequence: Synthetic oligonucleotide
ucaagcaccgaggacgugu

SEQ ID NO: 2727 - RNA, 19 nt, Artificial Sequence
  Description of Artificial Sequence: Synthetic oligonucleotide
caagcaccgaggacgugug

SEQ ID NO: 2728 - RNA, 19 nt, Artificial Sequence
  Description of Artificial Sequence: Synthetic oligonucleotide
aagcaccgaggacgugugc

SEQ ID NO: 2729 - RNA, 19 nt, Artificial Sequence
  Description of Artificial Sequence: Synthetic oligonucleotide
agcaccgaggacgugugcg

SEQ ID NO: 2730 - RNA, 19 nt, Artificial Sequence
  Description of Artificial Sequence: Synthetic oligonucleotide
gcaccgaggacgugugcgg

SEQ ID NO: 2731 - RNA, 19 nt, Artificial Sequence
  Description of Artificial Sequence: Synthetic oligonucleotide
caccgaggacgugugcggg

SEQ ID NO: 2732 - RNA, 19 nt, Artificial Sequence
  Description of Artificial Sequence: Synthetic oligonucleotide
accgaggacgugugcggga

SEQ ID NO: 2733 - RNA, 19 nt, Artificial Sequence
  Description of Artificial Sequence: Synthetic oligonucleotide
ccgaggacgugugcgggag

SEQ ID NO: 2734 - RNA, 19 nt, Artificial Sequence
  Description of Artificial Sequence: Synthetic oligonucleotide
cgaggacgugugcgggaga

SEQ ID NO: 2735 - RNA, 19 nt, Artificial Sequence
  Description of Artificial Sequence: Synthetic oligonucleotide
gaggacgugugcgggagag

SEQ ID NO: 2736 - RNA, 19 nt, Artificial Sequence
  Description of Artificial Sequence: Synthetic oligonucleotide
aggacgugugcgggagagu

SEQ ID NO: 2737 - RNA, 19 nt, Artificial Sequence
  Description of Artificial Sequence: Synthetic oligonucleotide
ggacgugugcgggagagug

SEQ ID NO: 2738 - RNA, 19 nt, Artificial Sequence
  Description of Artificial Sequence: Synthetic oligonucleotide
gacgugugcgggagaguga

SEQ ID NO: 2739 - RNA, 19 nt, Artificial Sequence
  Description of Artificial Sequence: Synthetic oligonucleotide
acgugugcgggagagugag

SEQ ID NO: 2740 - RNA, 19 nt, Artificial Sequence
  Description of Artificial Sequence: Synthetic oligonucleotide
cgugugcgggagagugaga

SEQ ID NO: 2741 - RNA, 19 nt, Artificial Sequence
  Description of Artificial Sequence: Synthetic oligonucleotide
gugugcgggagagugagau

SEQ ID NO: 2742 - RNA, 19 nt, Artificial Sequence
  Description of Artificial Sequence: Synthetic oligonucleotide
ugugcgggagagugagaug

SEQ ID NO: 2743 - RNA, 19 nt, Artificial Sequence
  Description of Artificial Sequence: Synthetic oligonucleotide
gugcgggagagugagaugu

SEQ ID NO: 2744 - RNA, 19 nt, Artificial Sequence
  Description of Artificial Sequence: Synthetic oligonucleotide
ugcgggagagugagaugug

SEQ ID NO: 2745 - RNA, 19 nt, Artificial Sequence
  Description of Artificial Sequence: Synthetic oligonucleotide
gcgggagagugagaugugc

SEQ ID NO: 2746 - RNA, 19 nt, Artificial Sequence
  Description of Artificial Sequence: Synthetic oligonucleotide
cgggagagugagaugugca

SEQ ID NO: 2747 - RNA, 19 nt, Artificial Sequence
  Description of Artificial Sequence: Synthetic oligonucleotide
gggagagugagaugugcac

SEQ ID NO: 2748 - RNA, 19 nt, Artificial Sequence
  Description of Artificial Sequence: Synthetic oligonucleotide
ggagagugagaugugcacu

SEQ ID NO: 2749 - RNA, 19 nt, Artificial Sequence
  Description of Artificial Sequence: Synthetic oligonucleotide
gagagugagaugugcacug

SEQ ID NO: 2750 - RNA, 19 nt, Artificial Sequence
  Description of Artificial Sequence: Synthetic oligonucleotide
agagugagaugugcacuga

SEQ ID NO: 2751 - RNA, 19 nt, Artificial Sequence
  Description of Artificial Sequence: Synthetic oligonucleotide
gagugagaugugcacugag

SEQ ID NO: 2752 - RNA, 19 nt, Artificial Sequence
  Description of Artificial Sequence: Synthetic oligonucleotide
agugagaugugcacugagg

SEQ ID NO: 2753 - RNA, 19 nt, Artificial Sequence
  Description of Artificial Sequence: Synthetic oligonucleotide
gugagaugugcacugaggg

SEQ ID NO: 2754 - RNA, 19 nt, Artificial Sequence
  Description of Artificial Sequence: Synthetic oligonucleotide
ugagaugugcacugaggga

SEQ ID NO: 2755 - RNA, 19 nt, Artificial Sequence
  Description of Artificial Sequence: Synthetic oligonucleotide
gagaugugcacugagggac

SEQ ID NO: 2756 - RNA, 19 nt, Artificial Sequence
  Description of Artificial Sequence: Synthetic oligonucleotide
agaugugcacugagggacu

SEQ ID NO: 2757 - RNA, 19 nt, Artificial Sequence
  Description of Artificial Sequence: Synthetic oligonucleotide
gaugugcacugagggacug

SEQ ID NO: 2758 - RNA, 19 nt, Artificial Sequence
  Description of Artificial Sequence: Synthetic oligonucleotide
augugcacugagggacugu

SEQ ID NO: 2759 - RNA, 19 nt, Artificial Sequence
  Description of Artificial Sequence: Synthetic oligonucleotide
ugugcacugagggacuguu

SEQ ID NO: 2760 - RNA, 19 nt, Artificial Sequence
  Description of Artificial Sequence: Synthetic oligonucleotide
gugcacugagggacuguug

SEQ ID NO: 2761 - RNA, 19 nt, Artificial Sequence
  Description of Artificial Sequence: Synthetic oligonucleotide
ugcacugagggacuguugg

SEQ ID NO: 2762 - RNA, 19 nt, Artificial Sequence
  Description of Artificial Sequence: Synthetic oligonucleotide
gcacugagggacuguuggc

SEQ ID NO: 2763 - RNA, 19 nt, Artificial Sequence
  Description of Artificial Sequence: Synthetic oligonucleotide
cacugagggacuguuggcc

SEQ ID NO: 2764 - RNA, 19 nt, Artificial Sequence
  Description of Artificial Sequence: Synthetic oligonucleotide
acugagggacuguuggccc

SEQ ID NO: 2765 - RNA, 19 nt, Artificial Sequence
  Description of Artificial Sequence: Synthetic oligonucleotide
cugagggacuguuggcccc

SEQ ID NO: 2766 - RNA, 19 nt, Artificial Sequence
  Description of Artificial Sequence: Synthetic oligonucleotide
ugagggacuguuggccccu

SEQ ID NO: 2767 - RNA, 19 nt, Artificial Sequence
  Description of Artificial Sequence: Synthetic oligonucleotide
gagggacuguuggccccug

SEQ ID NO: 2768 - RNA, 19 nt, Artificial Sequence
  Description of Artificial Sequence: Synthetic oligonucleotide
agggacuguuggccccugu

SEQ ID NO: 2769 - RNA, 19 nt, Artificial Sequence
  Description of Artificial Sequence: Synthetic oligonucleotide
gggacuguuggccccugug

SEQ ID NO: 2770 - RNA, 19 nt, Artificial Sequence
  Description of Artificial Sequence: Synthetic oligonucleotide
ggacuguuggccccugugg

SEQ ID NO: 2771 - RNA, 19 nt, Artificial Sequence
  Description of Artificial Sequence: Synthetic oligonucleotide
gacuguuggccccuguggg

SEQ ID NO: 2772 - RNA, 19 nt, Artificial Sequence
  Description of Artificial Sequence: Synthetic oligonucleotide
acuguuggccccugugggg

SEQ ID NO: 2773 - RNA, 19 nt, Artificial Sequence
  Description of Artificial Sequence: Synthetic oligonucleotide
cuguuggccccuguggggg

SEQ ID NO: 2774 - RNA, 19 nt, Artificial Sequence
  Description of Artificial Sequence: Synthetic oligonucleotide
uguuggccccugugggggc

SEQ ID NO: 2775 - RNA, 19 nt, Artificial Sequence
  Description of Artificial Sequence: Synthetic oligonucleotide
guuggccccugugggggcc

SEQ ID NO: 2776 - RNA, 19 nt, Artificial Sequence
  Description of Artificial Sequence: Synthetic oligonucleotide
uuggccccugugggggccu

SEQ ID NO: 2777 - RNA, 19 nt, Artificial Sequence
  Description of Artificial Sequence: Synthetic oligonucleotide
uggccccugugggggccug

SEQ ID NO: 2778 - RNA, 19 nt, Artificial Sequence
  Description of Artificial Sequence: Synthetic oligonucleotide
ggccccugugggggccugu

SEQ ID NO: 2779 - RNA, 19 nt, Artificial Sequence
  Description of Artificial Sequence: Synthetic oligonucleotide
gccccugugggggccugug

SEQ ID NO: 2780 - RNA, 19 nt, Artificial Sequence
  Description of Artificial Sequence: Synthetic oligonucleotide
ccccugugggggccuguga

SEQ ID NO: 2781 - RNA, 19 nt, Artificial Sequence
  Description of Artificial Sequence: Synthetic oligonucleotide
cccugugggggccugugag

SEQ ID NO: 2782 - RNA, 19 nt, Artificial Sequence
  Description of Artificial Sequence: Synthetic oligonucleotide
ccugugggggccugugagg

SEQ ID NO: 2783 - RNA, 19 nt, Artificial Sequence
  Description of Artificial Sequence: Synthetic oligonucleotide
cugugggggccugugaggg

SEQ ID NO: 2784 - RNA, 19 nt, Artificial Sequence
  Description of Artificial Sequence: Synthetic oligonucleotide
ugugggggccugugagggu

SEQ ID NO: 2785 - RNA, 19 nt, Artificial Sequence
  Description of Artificial Sequence: Synthetic oligonucleotide
gugggggccugugagggug

SEQ ID NO: 2786 - RNA, 19 nt, Artificial Sequence
  Description of Artificial Sequence: Synthetic oligonucleotide
ugggggccugugaggguga

SEQ ID NO: 2787 - RNA, 19 nt, Artificial Sequence
  Description of Artificial Sequence: Synthetic oligonucleotide
gggggccugugagggugac

SEQ ID NO: 2788 - RNA, 19 nt, Artificial Sequence
  Description of Artificial Sequence: Synthetic oligonucleotide
ggggccugugagggugacu

SEQ ID NO: 2789 - RNA, 19 nt, Artificial Sequence
  Description of Artificial Sequence: Synthetic oligonucleotide
gggccugugagggugacua

SEQ ID NO: 2790 - RNA, 19 nt, Artificial Sequence
  Description of Artificial Sequence: Synthetic oligonucleotide
ggccugugagggugacuac

SEQ ID NO: 2791 - RNA, 19 nt, Artificial Sequence
  Description of Artificial Sequence: Synthetic oligonucleotide
gccugugagggugacuacg

SEQ ID NO: 2792 - RNA, 19 nt, Artificial Sequence
  Description of Artificial Sequence: Synthetic oligonucleotide
ccugugagggugacuacgg

SEQ ID NO: 2793 - RNA, 19 nt, Artificial Sequence
  Description of Artificial Sequence: Synthetic oligonucleotide
cugugagggugacuacggg

SEQ ID NO: 2794 - RNA, 19 nt, Artificial Sequence
  Description of Artificial Sequence: Synthetic oligonucleotide
ugugagggugacuacgggg

SEQ ID NO: 2795 - RNA, 19 nt, Artificial Sequence
  Description of Artificial Sequence: Synthetic oligonucleotide
gugagggugacuacggggg

SEQ ID NO: 2796 - RNA, 19 nt, Artificial Sequence
  Description of Artificial Sequence: Synthetic oligonucleotide
ugagggugacuacgggggc

SEQ ID NO: 2797 - RNA, 19 nt, Artificial Sequence
  Description of Artificial Sequence: Synthetic oligonucleotide
gagggugacuacgggggcc

SEQ ID NO: 2798 - RNA, 19 nt, Artificial Sequence
  Description of Artificial Sequence: Synthetic oligonucleotide
agggugacuacgggggccc

SEQ ID NO: 2799 - RNA, 19 nt, Artificial Sequence
  Description of Artificial Sequence: Synthetic oligonucleotide
gggugacuacgggggccca

SEQ ID NO: 2800 - RNA, 19 nt, Artificial Sequence
  Description of Artificial Sequence: Synthetic oligonucleotide
ggugacuacgggggcccac

SEQ ID NO: 2801 - RNA, 19 nt, Artificial Sequence
  Description of Artificial Sequence: Synthetic oligonucleotide
gugacuacgggggcccacu

SEQ ID NO: 2802 - RNA, 19 nt, Artificial Sequence
  Description of Artificial Sequence: Synthetic oligonucleotide
ugacuacgggggcccacuu

SEQ ID NO: 2803 - RNA, 19 nt, Artificial Sequence
  Description of Artificial Sequence: Synthetic oligonucleotide
gacuacgggggcccacuug

SEQ ID NO: 2804 - RNA, 19 nt, Artificial Sequence
  Description of Artificial Sequence: Synthetic oligonucleotide
acuacgggggcccacuugc

SEQ ID NO: 2805 - RNA, 19 nt, Artificial Sequence
  Description of Artificial Sequence: Synthetic oligonucleotide
cuacgggggcccacuugcc

SEQ ID NO: 2806 - RNA, 19 nt, Artificial Sequence
  Description of Artificial Sequence: Synthetic oligonucleotide
uacgggggcccacuugccu

SEQ ID NO: 2807 - RNA, 19 nt, Artificial Sequence
  Description of Artificial Sequence: Synthetic oligonucleotide
acgggggcccacuugccug

SEQ ID NO: 2808 - RNA, 19 nt, Artificial Sequence
  Description of Artificial Sequence: Synthetic oligonucleotide
cgggggcccacuugccugc

SEQ ID NO: 2809 - RNA, 19 nt, Artificial Sequence
  Description of Artificial Sequence: Synthetic oligonucleotide
gggggcccacuugccugcu

SEQ ID NO: 2810 - RNA, 19 nt, Artificial Sequence
  Description of Artificial Sequence: Synthetic oligonucleotide
ggggcccacuugccugcuu

SEQ ID NO: 2811 - RNA, 19 nt, Artificial Sequence
  Description of Artificial Sequence: Synthetic oligonucleotide
gggcccacuugccugcuuu

SEQ ID NO: 2812 - RNA, 19 nt, Artificial Sequence
  Description of Artificial Sequence: Synthetic oligonucleotide
ggcccacuugccugcuuua

SEQ ID NO: 2813 - RNA, 19 nt, Artificial Sequence
  Description of Artificial Sequence: Synthetic oligonucleotide
gcccacuugccugcuuuac

SEQ ID NO: 2814 - RNA, 19 nt, Artificial Sequence
  Description of Artificial Sequence: Synthetic oligonucleotide
cccacuugccugcuuuacc

SEQ ID NO: 2815 - RNA, 19 nt, Artificial Sequence
  Description of Artificial Sequence: Synthetic oligonucleotide
ccacuugccugcuuuaccc

SEQ ID NO: 2816 - RNA, 19 nt, Artificial Sequence
  Description of Artificial Sequence: Synthetic oligonucleotide
cacuugccugcuuuaccca

SEQ ID NO: 2817 - RNA, 19 nt, Artificial Sequence
  Description of Artificial Sequence: Synthetic oligonucleotide
acuugccugcuuuacccac

SEQ ID NO: 2818 - RNA, 19 nt, Artificial Sequence
  Description of Artificial Sequence: Synthetic oligonucleotide
cuugccugcuuuacccaca

SEQ ID NO: 2819 - RNA, 19 nt, Artificial Sequence
  Description of Artificial Sequence: Synthetic oligonucleotide
uugccugcuuuacccacaa

SEQ ID NO: 2820 - RNA, 19 nt, Artificial Sequence
  Description of Artificial Sequence: Synthetic oligonucleotide
ugccugcuuuacccacaac

SEQ ID NO: 2821 - RNA, 19 nt, Artificial Sequence
  Description of Artificial Sequence: Synthetic oligonucleotide
gccugcuuuacccacaacu

SEQ ID NO: 2822 - RNA, 19 nt, Artificial Sequence
  Description of Artificial Sequence: Synthetic oligonucleotide
ccugcuuuacccacaacug

SEQ ID NO: 2823 - RNA, 19 nt, Artificial Sequence
  Description of Artificial Sequence: Synthetic oligonucleotide
cugcuuuacccacaacugc

SEQ ID NO: 2824 - RNA, 19 nt, Artificial Sequence
  Description of Artificial Sequence: Synthetic oligonucleotide
ugcuuuacccacaacugcu

SEQ ID NO: 2825 - RNA, 19 nt, Artificial Sequence
  Description of Artificial Sequence: Synthetic oligonucleotide
gcuuuacccacaacugcug

SEQ ID NO: 2826 - RNA, 19 nt, Artificial Sequence
  Description of Artificial Sequence: Synthetic oligonucleotide
cuuuacccacaacugcugg

SEQ ID NO: 2827 - RNA, 19 nt, Artificial Sequence
  Description of Artificial Sequence: Synthetic oligonucleotide
uuuacccacaacugcuggg

SEQ ID NO: 2828 - RNA, 19 nt, Artificial Sequence
  Description of Artificial Sequence: Synthetic oligonucleotide
uuacccacaacugcugggu

SEQ ID NO: 2829 - RNA, 19 nt, Artificial Sequence
  Description of Artificial Sequence: Synthetic oligonucleotide
uacccacaacugcuggguc

SEQ ID NO: 2830 - RNA, 19 nt, Artificial Sequence
  Description of Artificial Sequence: Synthetic oligonucleotide
acccacaacugcugggucc

SEQ ID NO: 2831 - RNA, 19 nt, Artificial Sequence
  Description of Artificial Sequence: Synthetic oligonucleotide
cccacaacugcuggguccu

SEQ ID NO: 2832 - RNA, 19 nt, Artificial Sequence
  Description of Artificial Sequence: Synthetic oligonucleotide
ccacaacugcuggguccug

SEQ ID NO: 2833 - RNA, 19 nt, Artificial Sequence
  Description of Artificial Sequence: Synthetic oligonucleotide
cacaacugcuggguccugg

SEQ ID NO: 2834 - RNA, 19 nt, Artificial Sequence
  Description of Artificial Sequence: Synthetic oligonucleotide
acaacugcuggguccugga

SEQ ID NO: 2835 - RNA, 19 nt, Artificial Sequence
  Description of Artificial Sequence: Synthetic oligonucleotide
caacugcuggguccuggaa

SEQ ID NO: 2836 - RNA, 19 nt, Artificial Sequence
  Description of Artificial Sequence: Synthetic oligonucleotide
aacugcuggguccuggaag

SEQ ID NO: 2837 - RNA, 19 nt, Artificial Sequence
  Description of Artificial Sequence: Synthetic oligonucleotide
acugcuggguccuggaagg

SEQ ID NO: 2838 - RNA, 19 nt, Artificial Sequence
  Description of Artificial Sequence: Synthetic oligonucleotide
cugcuggguccuggaagga

SEQ ID NO: 2839 - RNA, 19 nt, Artificial Sequence
  Description of Artificial Sequence: Synthetic oligonucleotide
ugcuggguccuggaaggaa

SEQ ID NO: 2840 - RNA, 19 nt, Artificial Sequence
  Description of Artificial Sequence: Synthetic oligonucleotide
gcuggguccuggaaggaau

SEQ ID NO: 2841 - RNA, 19 nt, Artificial Sequence
  Description of Artificial Sequence: Synthetic oligonucleotide
cuggguccuggaaggaauu

SEQ ID NO: 2842 - RNA, 19 nt, Artificial Sequence
  Description of Artificial Sequence: Synthetic oligonucleotide
uggguccuggaaggaauua

SEQ ID NO: 2843 - RNA, 19 nt, Artificial Sequence
  Description of Artificial Sequence: Synthetic oligonucleotide
ggguccuggaaggaauuau

SEQ ID NO: 2844 - RNA, 19 nt, Artificial Sequence
  Description of Artificial Sequence: Synthetic oligonucleotide
gguccuggaaggaauuaua

SEQ ID NO: 2845 - RNA, 19 nt, Artificial Sequence
  Description of Artificial Sequence: Synthetic oligonucleotide
guccuggaaggaauuauaa

SEQ ID NO: 2846 - RNA, 19 nt, Artificial Sequence
  Description of Artificial Sequence: Synthetic oligonucleotide
uccuggaaggaauuauaau

SEQ ID NO: 2847 - RNA, 19 nt, Artificial Sequence
  Description of Artificial Sequence: Synthetic oligonucleotide
ccuggaaggaauuauaauc

SEQ ID NO: 2848 - RNA, 19 nt, Artificial Sequence
  Description of Artificial Sequence: Synthetic oligonucleotide
cuggaaggaauuauaaucc

SEQ ID NO: 2849 - RNA, 19 nt, Artificial Sequence
  Description of Artificial Sequence: Synthetic oligonucleotide
uggaaggaauuauaauccc

SEQ ID NO: 2850 - RNA, 19 nt, Artificial Sequence
  Description of Artificial Sequence: Synthetic oligonucleotide
ggaaggaauuauaaucccc

SEQ ID NO: 2851 - RNA, 19 nt, Artificial Sequence
  Description of Artificial Sequence: Synthetic oligonucleotide
gaaggaauuauaaucccca

SEQ ID NO: 2852 - RNA, 19 nt, Artificial Sequence
  Description of Artificial Sequence: Synthetic oligonucleotide
aaggaauuauaauccccaa

SEQ ID NO: 2853 - RNA, 19 nt, Artificial Sequence
  Description of Artificial Sequence: Synthetic oligonucleotide
aggaauuauaauccccaac

SEQ ID NO: 2854 - RNA, 19 nt, Artificial Sequence
  Description of Artificial Sequence: Synthetic oligonucleotide
ggaauuauaauccccaacc

SEQ ID NO: 2855 - RNA, 19 nt, Artificial Sequence
  Description of Artificial Sequence: Synthetic oligonucleotide
gaauuauaauccccaaccg

SEQ ID NO: 2856 - RNA, 19 nt, Artificial Sequence
  Description of Artificial Sequence: Synthetic oligonucleotide
aauuauaauccccaaccga

SEQ ID NO: 2857 - RNA, 19 nt, Artificial Sequence
  Description of Artificial Sequence: Synthetic oligonucleotide
auuauaauccccaaccgag

SEQ ID NO: 2858 - RNA, 19 nt, Artificial Sequence
  Description of Artificial Sequence: Synthetic oligonucleotide
uuauaauccccaaccgagu

SEQ ID NO: 2859 - RNA, 19 nt, Artificial Sequence
  Description of Artificial Sequence: Synthetic oligonucleotide
uauaauccccaaccgagua

SEQ ID NO: 2860 - RNA, 19 nt, Artificial Sequence
  Description of Artificial Sequence: Synthetic oligonucleotide
auaauccccaaccgaguau

SEQ ID NO: 2861 - RNA, 19 nt, Artificial Sequence
  Description of Artificial Sequence: Synthetic oligonucleotide
uaauccccaaccgaguaug

SEQ ID NO: 2862 - RNA, 19 nt, Artificial Sequence
  Description of Artificial Sequence: Synthetic oligonucleotide
aauccccaaccgaguaugc

SEQ ID NO: 2863 - RNA, 19 nt, Artificial Sequence
  Description of Artificial Sequence: Synthetic oligonucleotide
auccccaaccgaguaugcg

SEQ ID NO: 2864 - RNA, 19 nt, Artificial Sequence
  Description of Artificial Sequence: Synthetic oligonucleotide
uccccaaccgaguaugcgc

SEQ ID NO: 2865 - RNA, 19 nt, Artificial Sequence
  Description of Artificial Sequence: Synthetic oligonucleotide
ccccaaccgaguaugcgca

SEQ ID NO: 2866 - RNA, 19 nt, Artificial Sequence
  Description of Artificial Sequence: Synthetic oligonucleotide
cccaaccgaguaugcgcaa

SEQ ID NO: 2867 - RNA, 19 nt, Artificial Sequence
  Description of Artificial Sequence: Synthetic oligonucleotide
ccaaccgaguaugcgcaag

SEQ ID NO: 2868 - RNA, 19 nt, Artificial Sequence
  Description of Artificial Sequence: Synthetic oligonucleotide
caaccgaguaugcgcaagg

SEQ ID NO: 2869 - RNA, 19 nt, Artificial Sequence
  Description of Artificial Sequence: Synthetic oligonucleotide
aaccgaguaugcgcaaggu

SEQ ID NO: 2870 - RNA, 19 nt, Artificial Sequence
  Description of Artificial Sequence: Synthetic oligonucleotide
accgaguaugcgcaagguc

SEQ ID NO: 2871 - RNA, 19 nt, Artificial Sequence
  Description of Artificial Sequence: Synthetic oligonucleotide
ccgaguaugcgcaaggucc

SEQ ID NO: 2872 - RNA, 19 nt, Artificial Sequence
  Description of Artificial Sequence: Synthetic oligonucleotide
cgaguaugcgcaagguccc

SEQ ID NO: 2873 - RNA, 19 nt, Artificial Sequence
  Description of Artificial Sequence: Synthetic oligonucleotide
gaguaugcgcaaggucccg

SEQ ID NO: 2874 - RNA, 19 nt, Artificial Sequence
  Description of Artificial Sequence: Synthetic oligonucleotide
aguaugcgcaaggucccgc

SEQ ID NO: 2875 - RNA, 19 nt, Artificial Sequence
  Description of Artificial Sequence: Synthetic oligonucleotide
guaugcgcaaggucccgcu

SEQ ID NO: 2876 - RNA, 19 nt, Artificial Sequence
  Description of Artificial Sequence: Synthetic oligonucleotide
uaugcgcaaggucccgcug

SEQ ID NO: 2877 - RNA, 19 nt, Artificial Sequence
  Description of Artificial Sequence: Synthetic oligonucleotide
augcgcaaggucccgcugg

SEQ ID NO: 2878 - RNA, 19 nt, Artificial Sequence
  Description of Artificial Sequence: Synthetic oligonucleotide
ugcgcaaggucccgcuggc

SEQ ID NO: 2879 - RNA, 19 nt, Artificial Sequence
  Description of Artificial Sequence: Synthetic oligonucleotide
gcgcaaggucccgcuggcc

SEQ ID NO: 2880 - RNA, 19 nt, Artificial Sequence
  Description of Artificial Sequence: Synthetic oligonucleotide
cgcaaggucccgcuggcca

SEQ ID NO: 2881 - RNA, 19 nt, Artificial Sequence
  Description of Artificial Sequence: Synthetic oligonucleotide
gcaaggucccgcuggccag

SEQ ID NO: 2882 - RNA, 19 nt, Artificial Sequence
  Description of Artificial Sequence: Synthetic oligonucleotide
caaggucccgcuggccagc

SEQ ID NO: 2883 - RNA, 19 nt, Artificial Sequence
  Description of Artificial Sequence: Synthetic oligonucleotide
aaggucccgcuggccagcu

SEQ ID NO: 2884 - RNA, 19 nt, Artificial Sequence
  Description of Artificial Sequence: Synthetic oligonucleotide
aggucccgcuggccagcug

SEQ ID NO: 2885 - RNA, 19 nt, Artificial Sequence
  Description of Artificial Sequence: Synthetic oligonucleotide
ggucccgcuggccagcugu

SEQ ID NO: 2886 - RNA, 19 nt, Artificial Sequence
  Description of Artificial Sequence: Synthetic oligonucleotide
gucccgcuggccagcuguc

SEQ ID NO: 2887 - RNA, 19 nt, Artificial Sequence
  Description of Artificial Sequence: Synthetic oligonucleotide
ucccgcuggccagcugucu

SEQ ID NO: 2888 - RNA, 19 nt, Artificial Sequence
  Description of Artificial Sequence: Synthetic oligonucleotide
cccgcuggccagcugucuu

SEQ ID NO: 2889 - RNA, 19 nt, Artificial Sequence
  Description of Artificial Sequence: Synthetic oligonucleotide
ccgcuggccagcugucuuc

SEQ ID NO: 2890 - RNA, 19 nt, Artificial Sequence
  Description of Artificial Sequence: Synthetic oligonucleotide
cgcuggccagcugucuuca

SEQ ID NO: 2891 - RNA, 19 nt, Artificial Sequence
  Description of Artificial Sequence: Synthetic oligonucleotide
gcuggccagcugucuucac

SEQ ID NO: 2892 - RNA, 19 nt, Artificial Sequence
  Description of Artificial Sequence: Synthetic oligonucleotide
cuggccagcugucuucacg

SEQ ID NO: 2893 - RNA, 19 nt, Artificial Sequence
  Description of Artificial Sequence: Synthetic oligonucleotide
uggccagcugucuucacgc

SEQ ID NO: 2894 - RNA, 19 nt, Artificial Sequence
  Description of Artificial Sequence: Synthetic oligonucleotide
ggccagcugucuucacgcg

SEQ ID NO: 2895 - RNA, 19 nt, Artificial Sequence
  Description of Artificial Sequence: Synthetic oligonucleotide
gccagcugucuucacgcgu

SEQ ID NO: 2896 - RNA, 19 nt, Artificial Sequence
  Description of Artificial Sequence: Synthetic oligonucleotide
ccagcugucuucacgcgug

SEQ ID NO: 2897 - RNA, 19 nt, Artificial Sequence
  Description of Artificial Sequence: Synthetic oligonucleotide
cagcugucuucacgcgugu

SEQ ID NO: 2898 - RNA, 19 nt, Artificial Sequence
  Description of Artificial Sequence: Synthetic oligonucleotide
agcugucuucacgcguguc

SEQ ID NO: 2899 - RNA, 19 nt, Artificial Sequence
  Description of Artificial Sequence: Synthetic oligonucleotide
gcugucuucacgcgugucu

SEQ ID NO: 2900 - RNA, 19 nt, Artificial Sequence
  Description of Artificial Sequence: Synthetic oligonucleotide
cugucuucacgcgugucuc

SEQ ID NO: 2901 - RNA, 19 nt, Artificial Sequence
  Description of Artificial Sequence: Synthetic oligonucleotide
ugucuucacgcgugucucu

SEQ ID NO: 2902 - RNA, 19 nt, Artificial Sequence
  Description of Artificial Sequence: Synthetic oligonucleotide
gucuucacgcgugucucug

SEQ ID NO: 2903 - RNA, 19 nt, Artificial Sequence
  Description of Artificial Sequence: Synthetic oligonucleotide
ucuucacgcgugucucugu

SEQ ID NO: 2904 - RNA, 19 nt, Artificial Sequence
  Description of Artificial Sequence: Synthetic oligonucleotide
cuucacgcgugucucugug

SEQ ID NO: 2905 - RNA, 19 nt, Artificial Sequence
  Description of Artificial Sequence: Synthetic oligonucleotide
uucacgcgugucucugugu

SEQ ID NO: 2906 - RNA, 19 nt, Artificial Sequence
  Description of Artificial Sequence: Synthetic oligonucleotide
ucacgcgugucucuguguu

SEQ ID NO: 2907 - RNA, 19 nt, Artificial Sequence
  Description of Artificial Sequence: Synthetic oligonucleotide
cacgcgugucucuguguuu

SEQ ID NO: 2908 - RNA, 19 nt, Artificial Sequence
  Description of Artificial Sequence: Synthetic oligonucleotide
acgcgugucucuguguuug

SEQ ID NO: 2909 - RNA, 19 nt, Artificial Sequence
  Description of Artificial Sequence: Synthetic oligonucleotide
cgcgugucucuguguuugu

SEQ ID NO: 2910 - RNA, 19 nt, Artificial Sequence
  Description of Artificial Sequence: Synthetic oligonucleotide
gcgugucucuguguuugug

SEQ ID NO: 2911 - RNA, 19 nt, Artificial Sequence
  Description of Artificial Sequence: Synthetic oligonucleotide
cgugucucuguguuugugg

SEQ ID NO: 2912 - RNA, 19 nt, Artificial Sequence
  Description of Artificial Sequence: Synthetic oligonucleotide
gugucucuguguuugugga

SEQ ID NO: 2913 - RNA, 19 nt, Artificial Sequence
  Description of Artificial Sequence: Synthetic oligonucleotide
ugucucuguguuuguggac

SEQ ID NO: 2914 - RNA, 19 nt, Artificial Sequence
  Description of Artificial Sequence: Synthetic oligonucleotide
gucucuguguuuguggacu

SEQ ID NO: 2915 - RNA, 19 nt, Artificial Sequence
  Description of Artificial Sequence: Synthetic oligonucleotide
ucucuguguuuguggacug

SEQ ID NO: 2916 - RNA, 19 nt, Artificial Sequence
  Description of Artificial Sequence: Synthetic oligonucleotide
cucuguguuuguggacugg

SEQ ID NO: 2917 - RNA, 19 nt, Artificial Sequence
  Description of Artificial Sequence: Synthetic oligonucleotide
ucuguguuuguggacugga

SEQ ID NO: 2918 - RNA, 19 nt, Artificial Sequence
  Description of Artificial Sequence: Synthetic oligonucleotide
cuguguuuguggacuggau

SEQ ID NO: 2919 - RNA, 19 nt, Artificial Sequence
  Description of Artificial Sequence: Synthetic oligonucleotide
uguguuuguggacuggauu

SEQ ID NO: 2920 - RNA, 19 nt, Artificial Sequence
  Description of Artificial Sequence: Synthetic oligonucleotide
guguuuguggacuggauuc

SEQ ID NO: 2921 - RNA, 19 nt, Artificial Sequence
  Description of Artificial Sequence: Synthetic oligonucleotide
uguuuguggacuggauuca

SEQ ID NO: 2922 - RNA, 19 nt, Artificial Sequence
  Description of Artificial Sequence: Synthetic oligonucleotide
guuuguggacuggauucac

SEQ ID NO: 2923 - RNA, 19 nt, Artificial Sequence
  Description of Artificial Sequence: Synthetic oligonucleotide
uuuguggacuggauucaca

SEQ ID NO: 2924 - RNA, 19 nt, Artificial Sequence
  Description of Artificial Sequence: Synthetic oligonucleotide
uuguggacuggauucacaa

SEQ ID NO: 2925 - RNA, 19 nt, Artificial Sequence
  Description of Artificial Sequence: Synthetic oligonucleotide
uguggacuggauucacaag

SEQ ID NO: 2926 - RNA, 19 nt, Artificial Sequence
  Description of Artificial Sequence: Synthetic oligonucleotide
guggacuggauucacaagg

SEQ ID NO: 2927 - RNA, 19 nt, Artificial Sequence
  Description of Artificial Sequence: Synthetic oligonucleotide
uggacuggauucacaaggu

SEQ ID NO: 2928 - RNA, 19 nt, Artificial Sequence
  Description of Artificial Sequence: Synthetic oligonucleotide
ggacuggauucacaagguc

SEQ ID NO: 2929 - RNA, 19 nt, Artificial Sequence
  Description of Artificial Sequence: Synthetic oligonucleotide
gacuggauucacaagguca

SEQ ID NO: 2930 - RNA, 19 nt, Artificial Sequence
  Description of Artificial Sequence: Synthetic oligonucleotide
acuggauucacaaggucau

SEQ ID NO: 2931 - RNA, 19 nt, Artificial Sequence
  Description of Artificial Sequence: Synthetic oligonucleotide
cuggauucacaaggucaug

SEQ ID NO: 2932 - RNA, 19 nt, Artificial Sequence
  Description of Artificial Sequence: Synthetic oligonucleotide
uggauucacaaggucauga

SEQ ID NO: 2933 - RNA, 19 nt, Artificial Sequence
  Description of Artificial Sequence: Synthetic oligonucleotide
ggauucacaaggucaugag

SEQ ID NO: 2934 - RNA, 19 nt, Artificial Sequence
  Description of Artificial Sequence: Synthetic oligonucleotide
gauucacaaggucaugaga

SEQ ID NO: 2935 - RNA, 19 nt, Artificial Sequence
  Description of Artificial Sequence: Synthetic oligonucleotide
auucacaaggucaugagac

SEQ ID NO: 2936 - RNA, 19 nt, Artificial Sequence
  Description of Artificial Sequence: Synthetic oligonucleotide
uucacaaggucaugagacu

SEQ ID NO: 2937 - RNA, 19 nt, Artificial Sequence
  Description of Artificial Sequence: Synthetic oligonucleotide
ucacaaggucaugagacug

SEQ ID NO: 2938 - RNA, 19 nt, Artificial Sequence
  Description of Artificial Sequence: Synthetic oligonucleotide
cacaaggucaugagacugg

SEQ ID NO: 2939 - RNA, 19 nt, Artificial Sequence
  Description of Artificial Sequence: Synthetic oligonucleotide
acaaggucaugagacuggg

SEQ ID NO: 2940 - RNA, 19 nt, Artificial Sequence
  Description of Artificial Sequence: Synthetic oligonucleotide
caaggucaugagacugggu

SEQ ID NO: 2941 - RNA, 19 nt, Artificial Sequence
  Description of Artificial Sequence: Synthetic oligonucleotide
aaggucaugagacuggguu

SEQ ID NO: 2942 - RNA, 19 nt, Artificial Sequence
  Description of Artificial Sequence: Synthetic oligonucleotide
aggucaugagacuggguua

SEQ ID NO: 2943 - RNA, 19 nt, Artificial Sequence
  Description of Artificial Sequence: Synthetic oligonucleotide
ggucaugagacuggguuag

SEQ ID NO: 2944 - RNA, 19 nt, Artificial Sequence
  Description of Artificial Sequence: Synthetic oligonucleotide
gucaugagacuggguuagg

SEQ ID NO: 2945 - RNA, 19 nt, Artificial Sequence
  Description of Artificial Sequence: Synthetic oligonucleotide
ucaugagacuggguuaggc

SEQ ID NO: 2946 - RNA, 19 nt, Artificial Sequence
  Description of Artificial Sequence: Synthetic oligonucleotide
caugagacuggguuaggcc

SEQ ID NO: 2947 - RNA, 19 nt, Artificial Sequence
  Description of Artificial Sequence: Synthetic oligonucleotide
augagacuggguuaggccc

SEQ ID NO: 2948 - RNA, 19 nt, Artificial Sequence
  Description of Artificial Sequence: Synthetic oligonucleotide
ugagacuggguuaggccca

SEQ ID NO: 2949 - RNA, 19 nt, Artificial Sequence
  Description of Artificial Sequence: Synthetic oligonucleotide
gagacuggguuaggcccag

SEQ ID NO: 2950 - RNA, 19 nt, Artificial Sequence
  Description of Artificial Sequence: Synthetic oligonucleotide
agacuggguuaggcccagc

SEQ ID NO: 2951 - RNA, 19 nt, Artificial Sequence
  Description of Artificial Sequence: Synthetic oligonucleotide
gacuggguuaggcccagcc

SEQ ID NO: 2952 - RNA, 19 nt, Artificial Sequence
  Description of Artificial Sequence: Synthetic oligonucleotide
acuggguuaggcccagccu

SEQ ID NO: 2953 - RNA, 19 nt, Artificial Sequence
  Description of Artificial Sequence: Synthetic oligonucleotide
cuggguuaggcccagccuu

SEQ ID NO: 2954 - RNA, 19 nt, Artificial Sequence
  Description of Artificial Sequence: Synthetic oligonucleotide
uggguuaggcccagccuug

SEQ ID NO: 2955 - RNA, 19 nt, Artificial Sequence
  Description of Artificial Sequence: Synthetic oligonucleotide
ggguuaggcccagccuuga

SEQ ID NO: 2956 - RNA, 19 nt, Artificial Sequence
  Description of Artificial Sequence: Synthetic oligonucleotide
gguuaggcccagccuugau

SEQ ID NO: 2957 - RNA, 19 nt, Artificial Sequence
  Description of Artificial Sequence: Synthetic oligonucleotide
guuaggcccagccuugaug

SEQ ID NO: 2958 - RNA, 19 nt, Artificial Sequence
  Description of Artificial Sequence: Synthetic oligonucleotide
uuaggcccagccuugaugc

SEQ ID NO: 2959 - RNA, 19 nt, Artificial Sequence
  Description of Artificial Sequence: Synthetic oligonucleotide
uaggcccagccuugaugcc

SEQ ID NO: 2960 - RNA, 19 nt, Artificial Sequence
  Description of Artificial Sequence: Synthetic oligonucleotide
aggcccagccuugaugcca

SEQ ID NO: 2961 - RNA, 19 nt, Artificial Sequence
  Description of Artificial Sequence: Synthetic oligonucleotide
ggcccagccuugaugccau

SEQ ID NO: 2962 - RNA, 19 nt, Artificial Sequence
  Description of Artificial Sequence: Synthetic oligonucleotide
gcccagccuugaugccaua

SEQ ID NO: 2963 - RNA, 19 nt, Artificial Sequence
  Description of Artificial Sequence: Synthetic oligonucleotide
cccagccuugaugccauau

SEQ ID NO: 2964 - RNA, 19 nt, Artificial Sequence
  Description of Artificial Sequence: Synthetic oligonucleotide
ccagccuugaugccauaug

SEQ ID NO: 2965 - RNA, 19 nt, Artificial Sequence
  Description of Artificial Sequence: Synthetic oligonucleotide
cagccuugaugccauaugc

SEQ ID NO: 2966 - RNA, 19 nt, Artificial Sequence
  Description of Artificial Sequence: Synthetic oligonucleotide
agccuugaugccauaugcc

SEQ ID NO: 2967 - RNA, 19 nt, Artificial Sequence
  Description of Artificial Sequence: Synthetic oligonucleotide
gccuugaugccauaugccu

SEQ ID NO: 2968 - RNA, 19 nt, Artificial Sequence
  Description of Artificial Sequence: Synthetic oligonucleotide
ccuugaugccauaugccuu

SEQ ID NO: 2969 - RNA, 19 nt, Artificial Sequence
  Description of Artificial Sequence: Synthetic oligonucleotide
cuugaugccauaugccuug

SEQ ID NO: 2970 - RNA, 19 nt, Artificial Sequence
  Description of Artificial Sequence: Synthetic oligonucleotide
uugaugccauaugccuugg

SEQ ID NO: 2971 - RNA, 19 nt, Artificial Sequence
  Description of Artificial Sequence: Synthetic oligonucleotide
ugaugccauaugccuuggg

SEQ ID NO: 2972 - RNA, 19 nt, Artificial Sequence
  Description of Artificial Sequence: Synthetic oligonucleotide
gaugccauaugccuugggg

SEQ ID NO: 2973 - RNA, 19 nt, Artificial Sequence
  Description of Artificial Sequence: Synthetic oligonucleotide
augccauaugccuugggga

SEQ ID NO: 2974 - RNA, 19 nt, Artificial Sequence
  Description of Artificial Sequence: Synthetic oligonucleotide
ugccauaugccuuggggag

SEQ ID NO: 2975 - RNA, 19 nt, Artificial Sequence
  Description of Artificial Sequence: Synthetic oligonucleotide
gccauaugccuuggggagg

SEQ ID NO: 2976 - RNA, 19 nt, Artificial Sequence
  Description of Artificial Sequence: Synthetic oligonucleotide
ccauaugccuuggggagga

SEQ ID NO: 2977 - RNA, 19 nt, Artificial Sequence
  Description of Artificial Sequence: Synthetic oligonucleotide
cauaugccuuggggaggac

SEQ ID NO: 2978 - RNA, 19 nt, Artificial Sequence
  Description of Artificial Sequence: Synthetic oligonucleotide
auaugccuuggggaggaca

SEQ ID NO: 2979 - RNA, 19 nt, Artificial Sequence
  Description of Artificial Sequence: Synthetic oligonucleotide
uaugccuuggggaggacaa

SEQ ID NO: 2980 - RNA, 19 nt, Artificial Sequence
  Description of Artificial Sequence: Synthetic oligonucleotide
augccuuggggaggacaaa

SEQ ID NO: 2981 - RNA, 19 nt, Artificial Sequence
  Description of Artificial Sequence: Synthetic oligonucleotide
ugccuuggggaggacaaaa

SEQ ID NO: 2982 - RNA, 19 nt, Artificial Sequence
  Description of Artificial Sequence: Synthetic oligonucleotide
gccuuggggaggacaaaac

SEQ ID NO: 2983 - RNA, 19 nt, Artificial Sequence
  Description of Artificial Sequence: Synthetic oligonucleotide
ccuuggggaggacaaaacu

SEQ ID NO: 2984 - RNA, 19 nt, Artificial Sequence
  Description of Artificial Sequence: Synthetic oligonucleotide
cuuggggaggacaaaacuu

SEQ ID NO: 2985 - RNA, 19 nt, Artificial Sequence
  Description of Artificial Sequence: Synthetic oligonucleotide
uuggggaggacaaaacuuc

SEQ ID NO: 2986 - RNA, 19 nt, Artificial Sequence
  Description of Artificial Sequence: Synthetic oligonucleotide
uggggaggacaaaacuucu

SEQ ID NO: 2987 - RNA, 19 nt, Artificial Sequence
  Description of Artificial Sequence: Synthetic oligonucleotide
ggggaggacaaaacuucuu

SEQ ID NO: 2988 - RNA, 19 nt, Artificial Sequence
  Description of Artificial Sequence: Synthetic oligonucleotide
gggaggacaaaacuucuug

SEQ ID NO: 2989 - RNA, 19 nt, Artificial Sequence
  Description of Artificial Sequence: Synthetic oligonucleotide
ggaggacaaaacuucuugu

SEQ ID NO: 2990 - RNA, 19 nt, Artificial Sequence
  Description of Artificial Sequence: Synthetic oligonucleotide
gaggacaaaacuucuuguc

SEQ ID NO: 2991 - RNA, 19 nt, Artificial Sequence
  Description of Artificial Sequence: Synthetic oligonucleotide
aggacaaaacuucuuguca

SEQ ID NO: 2992 - RNA, 19 nt, Artificial Sequence
  Description of Artificial Sequence: Synthetic oligonucleotide
ggacaaaacuucuugucag

SEQ ID NO: 2993 - RNA, 19 nt, Artificial Sequence
  Description of Artificial Sequence: Synthetic oligonucleotide
gacaaaacuucuugucaga

SEQ ID NO: 2994 - RNA, 19 nt, Artificial Sequence
  Description of Artificial Sequence: Synthetic oligonucleotide
acaaaacuucuugucagac

SEQ ID NO: 2995 - RNA, 19 nt, Artificial Sequence
  Description of Artificial Sequence: Synthetic oligonucleotide
caaaacuucuugucagaca

SEQ ID NO: 2996 - RNA, 19 nt, Artificial Sequence
  Description of Artificial Sequence: Synthetic oligonucleotide
aaaacuucuugucagacau

SEQ ID NO: 2997 - RNA, 19 nt, Artificial Sequence
  Description of Artificial Sequence: Synthetic oligonucleotide
aaacuucuugucagacaua

SEQ ID NO: 2998 - RNA, 19 nt, Artificial Sequence
  Description of Artificial Sequence: Synthetic oligonucleotide
aacuucuugucagacauaa

SEQ ID NO: 2999 - RNA, 19 nt, Artificial Sequence
  Description of Artificial Sequence: Synthetic oligonucleotide
acuucuugucagacauaaa

SEQ ID NO: 3000 - RNA, 19 nt, Artificial Sequence
  Description of Artificial Sequence: Synthetic oligonucleotide
cuucuugucagacauaaag

SEQ ID NO: 3001 - RNA, 19 nt, Artificial Sequence
  Description of Artificial Sequence: Synthetic oligonucleotide
uucuugucagacauaaagc

SEQ ID NO: 3002 - RNA, 19 nt, Artificial Sequence
  Description of Artificial Sequence: Synthetic oligonucleotide
ucuugucagacauaaagcc

SEQ ID NO: 3003 - RNA, 19 nt, Artificial Sequence
  Description of Artificial Sequence: Synthetic oligonucleotide
cuugucagacauaaagcca

SEQ ID NO: 3004 - RNA, 19 nt, Artificial Sequence
  Description of Artificial Sequence: Synthetic oligonucleotide
uugucagacauaaagccau

SEQ ID NO: 3005 - RNA, 19 nt, Artificial Sequence
  Description of Artificial Sequence: Synthetic oligonucleotide
ugucagacauaaagccaug

SEQ ID NO: 3006 - RNA, 19 nt, Artificial Sequence
  Description of Artificial Sequence: Synthetic oligonucleotide
gucagacauaaagccaugu

SEQ ID NO: 3007 - RNA, 19 nt, Artificial Sequence
  Description of Artificial Sequence: Synthetic oligonucleotide
ucagacauaaagccauguu

SEQ ID NO: 3008 - RNA, 19 nt, Artificial Sequence
  Description of Artificial Sequence: Synthetic oligonucleotide
cagacauaaagccauguuu

SEQ ID NO: 3009 - RNA, 19 nt, Artificial Sequence
  Description of Artificial Sequence: Synthetic oligonucleotide
agacauaaagccauguuuc

SEQ ID NO: 3010 - RNA, 19 nt, Artificial Sequence
  Description of Artificial Sequence: Synthetic oligonucleotide
gacauaaagccauguuucc

SEQ ID NO: 3011 - RNA, 19 nt, Artificial Sequence
  Description of Artificial Sequence: Synthetic oligonucleotide
acauaaagccauguuuccu

SEQ ID NO: 3012 - RNA, 19 nt, Artificial Sequence
  Description of Artificial Sequence: Synthetic oligonucleotide
cauaaagccauguuuccuc

SEQ ID NO: 3013 - RNA, 19 nt, Artificial Sequence
  Description of Artificial Sequence: Synthetic oligonucleotide
auaaagccauguuuccucu

SEQ ID NO: 3014 - RNA, 19 nt, Artificial Sequence
  Description of Artificial Sequence: Synthetic oligonucleotide
uaaagccauguuuccucuu

SEQ ID NO: 3015 - RNA, 19 nt, Artificial Sequence
  Description of Artificial Sequence: Synthetic oligonucleotide
aaagccauguuuccucuuu

SEQ ID NO: 3016 - RNA, 19 nt, Artificial Sequence
  Description of Artificial Sequence: Synthetic oligonucleotide
aagccauguuuccucuuua

SEQ ID NO: 3017 - RNA, 19 nt, Artificial Sequence
  Description of Artificial Sequence: Synthetic oligonucleotide
agccauguuuccucuuuau

SEQ ID NO: 3018 - RNA, 19 nt, Artificial Sequence
  Description of Artificial Sequence: Synthetic oligonucleotide
gccauguuuccucuuuaug

SEQ ID NO: 3019 - RNA, 19 nt, Artificial Sequence
  Description of Artificial Sequence: Synthetic oligonucleotide
ccauguuuccucuuuaugc

SEQ ID NO: 3020 - RNA, 19 nt, Artificial Sequence
  Description of Artificial Sequence: Synthetic oligonucleotide
cauguuuccucuuuaugcc

SEQ ID NO: 3021 - RNA, 19 nt, Artificial Sequence
  Description of Artificial Sequence: Synthetic oligonucleotide
auguuuccucuuuaugccu

SEQ ID NO: 3022 - RNA, 19 nt, Artificial Sequence
  Description of Artificial Sequence: Synthetic oligonucleotide
uguuuccucuuuaugccug

SEQ ID NO: 3023 - RNA, 19 nt, Artificial Sequence
  Description of Artificial Sequence: Synthetic oligonucleotide
guuuccucuuuaugccugu

SEQ ID NO: 3024 - RNA, 19 nt, Artificial Sequence
  Description of Artificial Sequence: Synthetic oligonucleotide
uuuccucuuuaugccugua

SEQ ID NO: 3025 - RNA, 19 nt, Artificial Sequence
  Description of Artificial Sequence: Synthetic oligonucleotide
gguccccuagcggaggcug

SEQ ID NO: 3026 - RNA, 19 nt, Artificial Sequence
  Description of Artificial Sequence: Synthetic oligonucleotide
ggguccccuagcggaggcu

SEQ ID NO: 3027 - RNA, 19 nt, Artificial Sequence
  Description of Artificial Sequence: Synthetic oligonucleotide
gggguccccuagcggaggc

SEQ ID NO: 3028 - RNA, 19 nt, Artificial Sequence
  Description of Artificial Sequence: Synthetic oligonucleotide
ggggguccccuagcggagg

SEQ ID NO: 3029 - RNA, 19 nt, Artificial Sequence
  Description of Artificial Sequence: Synthetic oligonucleotide
aggggguccccuagcggag

SEQ ID NO: 3030 - RNA, 19 nt, Artificial Sequence
  Description of Artificial Sequence: Synthetic oligonucleotide
gaggggguccccuagcgga

SEQ ID NO: 3031 - RNA, 19 nt, Artificial Sequence
  Description of Artificial Sequence: Synthetic oligonucleotide
ggaggggguccccuagcgg

SEQ ID NO: 3032 - RNA, 19 nt, Artificial Sequence
  Description of Artificial Sequence: Synthetic oligonucleotide
uggaggggguccccuagcg

SEQ ID NO: 3033 - RNA, 19 nt, Artificial Sequence
  Description of Artificial Sequence: Synthetic oligonucleotide
auggaggggguccccuagc

SEQ ID NO: 3034 - RNA, 19 nt, Artificial Sequence
  Description of Artificial Sequence: Synthetic oligonucleotide
cauggaggggguccccuag

SEQ ID NO: 3035 - RNA, 19 nt, Artificial Sequence
  Description of Artificial Sequence: Synthetic oligonucleotide
ccauggaggggguccccua

SEQ ID NO: 3036 - RNA, 19 nt, Artificial Sequence
  Description of Artificial Sequence: Synthetic oligonucleotide
gccauggaggggguccccu

SEQ ID NO: 3037 - RNA, 19 nt, Artificial Sequence
  Description of Artificial Sequence: Synthetic oligonucleotide
agccauggagggggucccc

SEQ ID NO: 3038 - RNA, 19 nt, Artificial Sequence
  Description of Artificial Sequence: Synthetic oligonucleotide
aagccauggaggggguccc

SEQ ID NO: 3039 - RNA, 19 nt, Artificial Sequence
  Description of Artificial Sequence: Synthetic oligonucleotide
gaagccauggagggggucc

SEQ ID NO: 3040 - RNA, 19 nt, Artificial Sequence
  Description of Artificial Sequence: Synthetic oligonucleotide
ggaagccauggaggggguc

SEQ ID NO: 3041 - RNA, 19 nt, Artificial Sequence
  Description of Artificial Sequence: Synthetic oligonucleotide
gggaagccauggagggggu

SEQ ID NO: 3042 - RNA, 19 nt, Artificial Sequence
  Description of Artificial Sequence: Synthetic oligonucleotide
ugggaagccauggaggggg

SEQ ID NO: 3043 - RNA, 19 nt, Artificial Sequence
  Description of Artificial Sequence: Synthetic oligonucleotide
gugggaagccauggagggg

SEQ ID NO: 3044 - RNA, 19 nt, Artificial Sequence
  Description of Artificial Sequence: Synthetic oligonucleotide
ggugggaagccauggaggg

SEQ ID NO: 3045 - RNA, 19 nt, Artificial Sequence
  Description of Artificial Sequence: Synthetic oligonucleotide
cggugggaagccauggagg

SEQ ID NO: 3046 - RNA, 19 nt, Artificial Sequence
  Description of Artificial Sequence: Synthetic oligonucleotide
ccggugggaagccauggag

SEQ ID NO: 3047 - RNA, 19 nt, Artificial Sequence
  Description of Artificial Sequence: Synthetic oligonucleotide
cccggugggaagccaugga

SEQ ID NO: 3048 - RNA, 19 nt, Artificial Sequence
  Description of Artificial Sequence: Synthetic oligonucleotide
acccggugggaagccaugg

SEQ ID NO: 3049 - RNA, 19 nt, Artificial Sequence
  Description of Artificial Sequence: Synthetic oligonucleotide
aacccggugggaagccaug

SEQ ID NO: 3050 - RNA, 19 nt, Artificial Sequence
  Description of Artificial Sequence: Synthetic oligonucleotide
caacccggugggaagccau

SEQ ID NO: 3051 - RNA, 19 nt, Artificial Sequence
  Description of Artificial Sequence: Synthetic oligonucleotide
acaacccggugggaagcca

SEQ ID NO: 3052 - RNA, 19 nt, Artificial Sequence
  Description of Artificial Sequence: Synthetic oligonucleotide
aacaacccggugggaagcc

SEQ ID NO: 3053 - RNA, 19 nt, Artificial Sequence
  Description of Artificial Sequence: Synthetic oligonucleotide
gaacaacccggugggaagc

SEQ ID NO: 3054 - RNA, 19 nt, Artificial Sequence
  Description of Artificial Sequence: Synthetic oligonucleotide
ggaacaacccggugggaag

SEQ ID NO: 3055 - RNA, 19 nt, Artificial Sequence
  Description of Artificial Sequence: Synthetic oligonucleotide
uggaacaacccggugggaa

SEQ ID NO: 3056 - RNA, 19 nt, Artificial Sequence
  Description of Artificial Sequence: Synthetic oligonucleotide
cuggaacaacccgguggga

SEQ ID NO: 3057 - RNA, 19 nt, Artificial Sequence
  Description of Artificial Sequence: Synthetic oligonucleotide
ccuggaacaacccgguggg

SEQ ID NO: 3058 - RNA, 19 nt, Artificial Sequence
  Description of Artificial Sequence: Synthetic oligonucleotide
gccuggaacaacccggugg

SEQ ID NO: 3059 - RNA, 19 nt, Artificial Sequence
  Description of Artificial Sequence: Synthetic oligonucleotide
ggccuggaacaacccggug

SEQ ID NO: 3060 - RNA, 19 nt, Artificial Sequence
  Description of Artificial Sequence: Synthetic oligonucleotide
aggccuggaacaacccggu

SEQ ID NO: 3061 - RNA, 19 nt, Artificial Sequence
  Description of Artificial Sequence: Synthetic oligonucleotide
gaggccuggaacaacccgg

SEQ ID NO: 3062 - RNA, 19 nt, Artificial Sequence
  Description of Artificial Sequence: Synthetic oligonucleotide
ugaggccuggaacaacccg

SEQ ID NO: 3063 - RNA, 19 nt, Artificial Sequence
  Description of Artificial Sequence: Synthetic oligonucleotide
cugaggccuggaacaaccc

SEQ ID NO: 3064 - RNA, 19 nt, Artificial Sequence
  Description of Artificial Sequence: Synthetic oligonucleotide
gcugaggccuggaacaacc

SEQ ID NO: 3065 - RNA, 19 nt, Artificial Sequence
  Description of Artificial Sequence: Synthetic oligonucleotide
agcugaggccuggaacaac

SEQ ID NO: 3066 - RNA, 19 nt, Artificial Sequence
  Description of Artificial Sequence: Synthetic oligonucleotide
aagcugaggccuggaacaa

SEQ ID NO: 3067 - RNA, 19 nt, Artificial Sequence
  Description of Artificial Sequence: Synthetic oligonucleotide
gaagcugaggccuggaaca

SEQ ID NO: 3068 - RNA, 19 nt, Artificial Sequence
  Description of Artificial Sequence: Synthetic oligonucleotide
cgaagcugaggccuggaac

SEQ ID NO: 3069 - RNA, 19 nt, Artificial Sequence
  Description of Artificial Sequence: Synthetic oligonucleotide
gcgaagcugaggccuggaa

SEQ ID NO: 3070 - RNA, 19 nt, Artificial Sequence
  Description of Artificial Sequence: Synthetic oligonucleotide
ggcgaagcugaggccugga

SEQ ID NO: 3071 - RNA, 19 nt, Artificial Sequence
  Description of Artificial Sequence: Synthetic oligonucleotide
cggcgaagcugaggccugg

SEQ ID NO: 3072 - RNA, 19 nt, Artificial Sequence
  Description of Artificial Sequence: Synthetic oligonucleotide
ucggcgaagcugaggccug

SEQ ID NO: 3073 - RNA, 19 nt, Artificial Sequence
  Description of Artificial Sequence: Synthetic oligonucleotide
uucggcgaagcugaggccu

SEQ ID NO: 3074 - RNA, 19 nt, Artificial Sequence
  Description of Artificial Sequence: Synthetic oligonucleotide
uuucggcgaagcugaggcc

SEQ ID NO: 3075 - RNA, 19 nt, Artificial Sequence
  Description of Artificial Sequence: Synthetic oligonucleotide
cuuucggcgaagcugaggc

SEQ ID NO: 3076 - RNA, 19 nt, Artificial Sequence
  Description of Artificial Sequence: Synthetic oligonucleotide
ccuuucggcgaagcugagg

SEQ ID NO: 3077 - RNA, 19 nt, Artificial Sequence
  Description of Artificial Sequence: Synthetic oligonucleotide
gccuuucggcgaagcugag

SEQ ID NO: 3078 - RNA, 19 nt, Artificial Sequence
  Description of Artificial Sequence: Synthetic oligonucleotide
ggccuuucggcgaagcuga

SEQ ID NO: 3079 - RNA, 19 nt, Artificial Sequence
  Description of Artificial Sequence: Synthetic oligonucleotide
aggccuuucggcgaagcug

SEQ ID NO: 3080 - RNA, 19 nt, Artificial Sequence
  Description of Artificial Sequence: Synthetic oligonucleotide
gaggccuuucggcgaagcu

SEQ ID NO: 3081 - RNA, 19 nt, Artificial Sequence
  Description of Artificial Sequence: Synthetic oligonucleotide
ugaggccuuucggcgaagc

SEQ ID NO: 3082 - RNA, 19 nt, Artificial Sequence
  Description of Artificial Sequence: Synthetic oligonucleotide
gugaggccuuucggcgaag

SEQ ID NO: 3083 - RNA, 19 nt, Artificial Sequence
  Description of Artificial Sequence: Synthetic oligonucleotide
ggugaggccuuucggcgaa

SEQ ID NO: 3084 - RNA, 19 nt, Artificial Sequence
  Description of Artificial Sequence: Synthetic oligonucleotide
uggugaggccuuucggcga

SEQ ID NO: 3085 - RNA, 19 nt, Artificial Sequence
  Description of Artificial Sequence: Synthetic oligonucleotide
guggugaggccuuucggcg

SEQ ID NO: 3086 - RNA, 19 nt, Artificial Sequence
  Description of Artificial Sequence: Synthetic oligonucleotide
gguggugaggccuuucggc

SEQ ID NO: 3087 - RNA, 19 nt, Artificial Sequence
  Description of Artificial Sequence: Synthetic oligonucleotide
agguggugaggccuuucgg

SEQ ID NO: 3088 - RNA, 19 nt, Artificial Sequence
  Description of Artificial Sequence: Synthetic oligonucleotide
gagguggugaggccuuucg

SEQ ID NO: 3089 - RNA, 19 nt, Artificial Sequence
  Description of Artificial Sequence: Synthetic oligonucleotide
ggagguggugaggccuuuc

SEQ ID NO: 3090 - RNA, 19 nt, Artificial Sequence
  Description of Artificial Sequence: Synthetic oligonucleotide
cggagguggugaggccuuu

SEQ ID NO: 3091 - RNA, 19 nt, Artificial Sequence
  Description of Artificial Sequence: Synthetic oligonucleotide
ucggagguggugaggccuu

SEQ ID NO: 3092 - RNA, 19 nt, Artificial Sequence
  Description of Artificial Sequence: Synthetic oligonucleotide
gucggagguggugaggccu

SEQ ID NO: 3093 - RNA, 19 nt, Artificial Sequence
  Description of Artificial Sequence: Synthetic oligonucleotide
ggucggagguggugaggcc

SEQ ID NO: 3094 - RNA, 19 nt, Artificial Sequence
  Description of Artificial Sequence: Synthetic oligonucleotide
aggucggagguggugaggc

SEQ ID NO: 3095 - RNA, 19 nt, Artificial Sequence
  Description of Artificial Sequence: Synthetic oligonucleotide
gaggucggagguggugagg

SEQ ID NO: 3096 - RNA, 19 nt, Artificial Sequence
  Description of Artificial Sequence: Synthetic oligonucleotide
ggaggucggagguggugag

SEQ ID NO: 3097 - RNA, 19 nt, Artificial Sequence
  Description of Artificial Sequence: Synthetic oligonucleotide
cggaggucggaggugguga

SEQ ID NO: 3098 - RNA, 19 nt, Artificial Sequence
  Description of Artificial Sequence: Synthetic oligonucleotide
gcggaggucggagguggug

SEQ ID NO: 3099 - RNA, 19 nt, Artificial Sequence
  Description of Artificial Sequence: Synthetic oligonucleotide
ggcggaggucggagguggu

SEQ ID NO: 3100 - RNA, 19 nt, Artificial Sequence
  Description of Artificial Sequence: Synthetic oligonucleotide
aggcggaggucggaggugg

SEQ ID NO: 3101 - RNA, 19 nt, Artificial Sequence
  Description of Artificial Sequence: Synthetic oligonucleotide
caggcggaggucggaggug

SEQ ID NO: 3102 - RNA, 19 nt, Artificial Sequence
  Description of Artificial Sequence: Synthetic oligonucleotide
gcaggcggaggucggaggu

SEQ ID NO: 3103 - RNA, 19 nt, Artificial Sequence
  Description of Artificial Sequence: Synthetic oligonucleotide
agcaggcggaggucggagg

SEQ ID NO: 3104 - RNA, 19 nt, Artificial Sequence
  Description of Artificial Sequence: Synthetic oligonucleotide
gagcaggcggaggucggag

SEQ ID NO: 3105 - RNA, 19 nt, Artificial Sequence
  Description of Artificial Sequence: Synthetic oligonucleotide
agagcaggcggaggucgga

SEQ ID NO: 3106 - RNA, 19 nt, Artificial Sequence
  Description of Artificial Sequence: Synthetic oligonucleotide
cagagcaggcggaggucgg

SEQ ID NO: 3107 - RNA, 19 nt, Artificial Sequence
  Description of Artificial Sequence: Synthetic oligonucleotide
ccagagcaggcggaggucg

SEQ ID NO: 3108 - RNA, 19 nt, Artificial Sequence
  Description of Artificial Sequence: Synthetic oligonucleotide
cccagagcaggcggagguc

SEQ ID NO: 3109 - RNA, 19 nt, Artificial Sequence
  Description of Artificial Sequence: Synthetic oligonucleotide
ccccagagcaggcggaggu

SEQ ID NO: 3110 - RNA, 19 nt, Artificial Sequence
  Description of Artificial Sequence: Synthetic oligonucleotide
uccccagagcaggcggagg

SEQ ID NO: 3111 - RNA, 19 nt, Artificial Sequence
  Description of Artificial Sequence: Synthetic oligonucleotide
auccccagagcaggcggag

SEQ ID NO: 3112 - RNA, 19 nt, Artificial Sequence
  Description of Artificial Sequence: Synthetic oligonucleotide
cauccccagagcaggcgga

SEQ ID NO: 3113 - RNA, 19 nt, Artificial Sequence
  Description of Artificial Sequence: Synthetic oligonucleotide
gcauccccagagcaggcgg

SEQ ID NO: 3114 - RNA, 19 nt, Artificial Sequence
  Description of Artificial Sequence: Synthetic oligonucleotide
agcauccccagagcaggcg

SEQ ID NO: 3115 - RNA, 19 nt, Artificial Sequence
  Description of Artificial Sequence: Synthetic oligonucleotide
gagcauccccagagcaggc

SEQ ID NO: 3116 - RNA, 19 nt, Artificial Sequence
  Description of Artificial Sequence: Synthetic oligonucleotide
ggagcauccccagagcagg

SEQ ID NO: 3117 - RNA, 19 nt, Artificial Sequence
  Description of Artificial Sequence: Synthetic oligonucleotide
gggagcauccccagagcag

SEQ ID NO: 3118 - RNA, 19 nt, Artificial Sequence
  Description of Artificial Sequence: Synthetic oligonucleotide
ugggagcauccccagagca

SEQ ID NO: 3119 - RNA, 19 nt, Artificial Sequence
  Description of Artificial Sequence: Synthetic oligonucleotide
cugggagcauccccagagc

SEQ ID NO: 3120 - RNA, 19 nt, Artificial Sequence
  Description of Artificial Sequence: Synthetic oligonucleotide
gcugggagcauccccagag

SEQ ID NO: 3121 - RNA, 19 nt, Artificial Sequence
  Description of Artificial Sequence: Synthetic oligonucleotide
ggcugggagcauccccaga

SEQ ID NO: 3122 - RNA, 19 nt, Artificial Sequence
  Description of Artificial Sequence: Synthetic oligonucleotide
gggcugggagcauccccag

SEQ ID NO: 3123 - RNA, 19 nt, Artificial Sequence
  Description of Artificial Sequence: Synthetic oligonucleotide
agggcugggagcaucccca

SEQ ID NO: 3124 - RNA, 19 nt, Artificial Sequence
  Description of Artificial Sequence: Synthetic oligonucleotide
cagggcugggagcaucccc

SEQ ID NO: 3125 - RNA, 19 nt, Artificial Sequence
  Description of Artificial Sequence: Synthetic oligonucleotide
gcagggcugggagcauccc

SEQ ID NO: 3126 - RNA, 19 nt, Artificial Sequence
  Description of Artificial Sequence: Synthetic oligonucleotide
agcagggcugggagcaucc

SEQ ID NO: 3127 - RNA, 19 nt, Artificial Sequence
  Description of Artificial Sequence: Synthetic oligonucleotide
cagcagggcugggagcauc

SEQ ID NO: 3128 - RNA, 19 nt, Artificial Sequence
  Description of Artificial Sequence: Synthetic oligonucleotide
gcagcagggcugggagcau

SEQ ID NO: 3129 - RNA, 19 nt, Artificial Sequence
  Description of Artificial Sequence: Synthetic oligonucleotide
cgcagcagggcugggagca

SEQ ID NO: 3130 - RNA, 19 nt, Artificial Sequence
  Description of Artificial Sequence: Synthetic oligonucleotide
ccgcagcagggcugggagc

SEQ ID NO: 3131 - RNA, 19 nt, Artificial Sequence
  Description of Artificial Sequence: Synthetic oligonucleotide
gccgcagcagggcugggag

SEQ ID NO: 3132 - RNA, 19 nt, Artificial Sequence
  Description of Artificial Sequence: Synthetic oligonucleotide
ugccgcagcagggcuggga

SEQ ID NO: 3133 - RNA, 19 nt, Artificial Sequence
  Description of Artificial Sequence: Synthetic oligonucleotide
cugccgcagcagggcuggg

SEQ ID NO: 3134 - RNA, 19 nt, Artificial Sequence
  Description of Artificial Sequence: Synthetic oligonucleotide
ucugccgcagcagggcugg

SEQ ID NO: 3135 - RNA, 19 nt, Artificial Sequence
  Description of Artificial Sequence: Synthetic oligonucleotide
uucugccgcagcagggcug

SEQ ID NO: 3136 - RNA, 19 nt, Artificial Sequence
  Description of Artificial Sequence: Synthetic oligonucleotide
guucugccgcagcagggcu

SEQ ID NO: 3137 - RNA, 19 nt, Artificial Sequence
  Description of Artificial Sequence: Synthetic oligonucleotide
cguucugccgcagcagggc

SEQ ID NO: 3138 - RNA, 19 nt, Artificial Sequence
  Description of Artificial Sequence: Synthetic oligonucleotide
gcguucugccgcagcaggg

SEQ ID NO: 3139 - RNA, 19 nt, Artificial Sequence
  Description of Artificial Sequence: Synthetic oligonucleotide
cgcguucugccgcagcagg

SEQ ID NO: 3140 - RNA, 19 nt, Artificial Sequence
  Description of Artificial Sequence: Synthetic oligonucleotide
ucgcguucugccgcagcag

SEQ ID NO: 3141 - RNA, 19 nt, Artificial Sequence
  Description of Artificial Sequence: Synthetic oligonucleotide
gucgcguucugccgcagca

SEQ ID NO: 3142 - RNA, 19 nt, Artificial Sequence
  Description of Artificial Sequence: Synthetic oligonucleotide
ugucgcguucugccgcagc

SEQ ID NO: 3143 - RNA, 19 nt, Artificial Sequence
  Description of Artificial Sequence: Synthetic oligonucleotide
augucgcguucugccgcag

SEQ ID NO: 3144 - RNA, 19 nt, Artificial Sequence
  Description of Artificial Sequence: Synthetic oligonucleotide
caugucgcguucugccgca

SEQ ID NO: 3145 - RNA, 19 nt, Artificial Sequence
  Description of Artificial Sequence: Synthetic oligonucleotide
gcaugucgcguucugccgc

SEQ ID NO: 3146 - RNA, 19 nt, Artificial Sequence
  Description of Artificial Sequence: Synthetic oligonucleotide
agcaugucgcguucugccg

SEQ ID NO: 3147 - RNA, 19 nt, Artificial Sequence
  Description of Artificial Sequence: Synthetic oligonucleotide
uagcaugucgcguucugcc

SEQ ID NO: 3148 - RNA, 19 nt, Artificial Sequence
  Description of Artificial Sequence: Synthetic oligonucleotide
uuagcaugucgcguucugc

SEQ ID NO: 3149 - RNA, 19 nt, Artificial Sequence
  Description of Artificial Sequence: Synthetic oligonucleotide
guuagcaugucgcguucug

SEQ ID NO: 3150 - RNA, 19 nt, Artificial Sequence
  Description of Artificial Sequence: Synthetic oligonucleotide
gguuagcaugucgcguucu

SEQ ID NO: 3151 - RNA, 19 nt, Artificial Sequence
  Description of Artificial Sequence: Synthetic oligonucleotide
cgguuagcaugucgcguuc

SEQ ID NO: 3152 - RNA, 19 nt, Artificial Sequence
  Description of Artificial Sequence: Synthetic oligonucleotide
ccgguuagcaugucgcguu

SEQ ID NO: 3153 - RNA, 19 nt, Artificial Sequence
  Description of Artificial Sequence: Synthetic oligonucleotide
uccgguuagcaugucgcgu

SEQ ID NO: 3154 - RNA, 19 nt, Artificial Sequence
  Description of Artificial Sequence: Synthetic oligonucleotide
uuccgguuagcaugucgcg

SEQ ID NO: 3155 - RNA, 19 nt, Artificial Sequence
  Description of Artificial Sequence: Synthetic oligonucleotide
auuccgguuagcaugucgc

SEQ ID NO: 3156 - RNA, 19 nt, Artificial Sequence
  Description of Artificial Sequence: Synthetic oligonucleotide
gauuccgguuagcaugucg

SEQ ID NO: 3157 - RNA, 19 nt, Artificial Sequence
  Description of Artificial Sequence: Synthetic oligonucleotide
ggauuccgguuagcauguc

SEQ ID NO: 3158 - RNA, 19 nt, Artificial Sequence
  Description of Artificial Sequence: Synthetic oligonucleotide
gggauuccgguuagcaugu

SEQ ID NO: 3159 - RNA, 19 nt, Artificial Sequence
  Description of Artificial Sequence: Synthetic oligonucleotide
agggauuccgguuagcaug

SEQ ID NO: 3160 - RNA, 19 nt, Artificial Sequence
  Description of Artificial Sequence: Synthetic oligonucleotide
uagggauuccgguuagcau

SEQ ID NO: 3161 - RNA, 19 nt, Artificial Sequence
  Description of Artificial Sequence: Synthetic oligonucleotide
cuagggauuccgguuagca

SEQ ID NO: 3162 - RNA, 19 nt, Artificial Sequence
  Description of Artificial Sequence: Synthetic oligonucleotide
ccuagggauuccgguuagc

SEQ ID NO: 3163 - RNA, 19 nt, Artificial Sequence
  Description of Artificial Sequence: Synthetic oligonucleotide
gccuagggauuccgguuag

SEQ ID NO: 3164 - RNA, 19 nt, Artificial Sequence
  Description of Artificial Sequence: Synthetic oligonucleotide
ggccuagggauuccgguua

SEQ ID NO: 3165 - RNA, 19 nt, Artificial Sequence
  Description of Artificial Sequence: Synthetic oligonucleotide
cggccuagggauuccgguu

SEQ ID NO: 3166 - RNA, 19 nt, Artificial Sequence
  Description of Artificial Sequence: Synthetic oligonucleotide
gcggccuagggauuccggu

SEQ ID NO: 3167 - RNA, 19 nt, Artificial Sequence
  Description of Artificial Sequence: Synthetic oligonucleotide
ggcggccuagggauuccgg

SEQ ID NO: 3168 - RNA, 19 nt, Artificial Sequence
  Description of Artificial Sequence: Synthetic oligonucleotide
aggcggccuagggauuccg

SEQ ID NO: 3169 - RNA, 19 nt, Artificial Sequence
  Description of Artificial Sequence: Synthetic oligonucleotide
caggcggccuagggauucc

SEQ ID NO: 3170 - RNA, 19 nt, Artificial Sequence
  Description of Artificial Sequence: Synthetic oligonucleotide
acaggcggccuagggauuc

SEQ ID NO: 3171 - RNA, 19 nt, Artificial Sequence
  Description of Artificial Sequence: Synthetic oligonucleotide
gacaggcggccuagggauu

SEQ ID NO: 3172 - RNA, 19 nt, Artificial Sequence
  Description of Artificial Sequence: Synthetic oligonucleotide
agacaggcggccuagggau

SEQ ID NO: 3173 - RNA, 19 nt, Artificial Sequence
  Description of Artificial Sequence: Synthetic oligonucleotide
gagacaggcggccuaggga

SEQ ID NO: 3174 - RNA, 19 nt, Artificial Sequence
  Description of Artificial Sequence: Synthetic oligonucleotide
ggagacaggcggccuaggg

SEQ ID NO: 3175 - RNA, 19 nt, Artificial Sequence
  Description of Artificial Sequence: Synthetic oligonucleotide
aggagacaggcggccuagg

SEQ ID NO: 3176 - RNA, 19 nt, Artificial Sequence
  Description of Artificial Sequence: Synthetic oligonucleotide
uaggagacaggcggccuag

SEQ ID NO: 3177 - RNA, 19 nt, Artificial Sequence
  Description of Artificial Sequence: Synthetic oligonucleotide
guaggagacaggcggccua

SEQ ID NO: 3178 - RNA, 19 nt, Artificial Sequence
  Description of Artificial Sequence: Synthetic oligonucleotide
gguaggagacaggcggccu

SEQ ID NO: 3179 - RNA, 19 nt, Artificial Sequence
  Description of Artificial Sequence: Synthetic oligonucleotide
ggguaggagacaggcggcc

SEQ ID NO: 3180 - RNA, 19 nt, Artificial Sequence
  Description of Artificial Sequence: Synthetic oligonucleotide
uggguaggagacaggcggc

SEQ ID NO: 3181 - RNA, 19 nt, Artificial Sequence
  Description of Artificial Sequence: Synthetic oligonucleotide
auggguaggagacaggcgg

SEQ ID NO: 3182 - RNA, 19 nt, Artificial Sequence
  Description of Artificial Sequence: Synthetic oligonucleotide
uauggguaggagacaggcg

SEQ ID NO: 3183 - RNA, 19 nt, Artificial Sequence
  Description of Artificial Sequence: Synthetic oligonucleotide
guauggguaggagacaggc

SEQ ID NO: 3184 - RNA, 19 nt, Artificial Sequence
  Description of Artificial Sequence: Synthetic oligonucleotide
aguauggguaggagacagg

SEQ ID NO: 3185 - RNA, 19 nt, Artificial Sequence
  Description of Artificial Sequence: Synthetic oligonucleotide
aaguauggguaggagacag

SEQ ID NO: 3186 - RNA, 19 nt, Artificial Sequence
  Description of Artificial Sequence: Synthetic oligonucleotide
uaaguauggguaggagaca

SEQ ID NO: 3187 - RNA, 19 nt, Artificial Sequence
  Description of Artificial Sequence: Synthetic oligonucleotide
cuaaguauggguaggagac

SEQ ID NO: 3188 - RNA, 19 nt, Artificial Sequence
  Description of Artificial Sequence: Synthetic oligonucleotide
ucuaaguauggguaggaga

SEQ ID NO: 3189 - RNA, 19 nt, Artificial Sequence
  Description of Artificial Sequence: Synthetic oligonucleotide
cucuaaguauggguaggag

SEQ ID NO: 3190 - RNA, 19 nt, Artificial Sequence
  Description of Artificial Sequence: Synthetic oligonucleotide
ccucuaaguauggguagga

SEQ ID NO: 3191 - RNA, 19 nt, Artificial Sequence
  Description of Artificial Sequence: Synthetic oligonucleotide
gccucuaaguauggguagg

SEQ ID NO: 3192 - RNA, 19 nt, Artificial Sequence
  Description of Artificial Sequence: Synthetic oligonucleotide
ggccucuaaguauggguag

SEQ ID NO: 3193 - RNA, 19 nt, Artificial Sequence
  Description of Artificial Sequence: Synthetic oligonucleotide
gggccucuaaguaugggua

SEQ ID NO: 3194 - RNA, 19 nt, Artificial Sequence
  Description of Artificial Sequence: Synthetic oligonucleotide
ggggccucuaaguaugggu

SEQ ID NO: 3195 - RNA, 19 nt, Artificial Sequence
  Description of Artificial Sequence: Synthetic oligonucleotide
cggggccucuaaguauggg

SEQ ID NO: 3196 - RNA, 19 nt, Artificial Sequence
  Description of Artificial Sequence: Synthetic oligonucleotide
gcggggccucuaaguaugg

SEQ ID NO: 3197 - RNA, 19 nt, Artificial Sequence
  Description of Artificial Sequence: Synthetic oligonucleotide
agcggggccucuaaguaug

SEQ ID NO: 3198 - RNA, 19 nt, Artificial Sequence
  Description of Artificial Sequence: Synthetic oligonucleotide
gagcggggccucuaaguau

SEQ ID NO: 3199 - RNA, 19 nt, Artificial Sequence
  Description of Artificial Sequence: Synthetic oligonucleotide
ugagcggggccucuaagua

SEQ ID NO: 3200 - RNA, 19 nt, Artificial Sequence
  Description of Artificial Sequence: Synthetic oligonucleotide
cugagcggggccucuaagu

SEQ ID NO: 3201 - RNA, 19 nt, Artificial Sequence
  Description of Artificial Sequence: Synthetic oligonucleotide
ucugagcggggccucuaag

SEQ ID NO: 3202 - RNA, 19 nt, Artificial Sequence
  Description of Artificial Sequence: Synthetic oligonucleotide
gucugagcggggccucuaa

SEQ ID NO: 3203 - RNA, 19 nt, Artificial Sequence
  Description of Artificial Sequence: Synthetic oligonucleotide
cgucugagcggggccucua

SEQ ID NO: 3204 - RNA, 19 nt, Artificial Sequence
  Description of Artificial Sequence: Synthetic oligonucleotide
ccgucugagcggggccucu

SEQ ID NO: 3205 - RNA, 19 nt, Artificial Sequence
  Description of Artificial Sequence: Synthetic oligonucleotide
accgucugagcggggccuc

SEQ ID NO: 3206 - RNA, 19 nt, Artificial Sequence
  Description of Artificial Sequence: Synthetic oligonucleotide
gaccgucugagcggggccu

SEQ ID NO: 3207 - RNA, 19 nt, Artificial Sequence
  Description of Artificial Sequence: Synthetic oligonucleotide
ggaccgucugagcggggcc

SEQ ID NO: 3208 - RNA, 19 nt, Artificial Sequence
  Description of Artificial Sequence: Synthetic oligonucleotide
aggaccgucugagcggggc

SEQ ID NO: 3209 - RNA, 19 nt, Artificial Sequence
  Description of Artificial Sequence: Synthetic oligonucleotide
aaggaccgucugagcgggg

SEQ ID NO: 3210 - RNA, 19 nt, Artificial Sequence
  Description of Artificial Sequence: Synthetic oligonucleotide
uaaggaccgucugagcggg

SEQ ID NO: 3211 - RNA, 19 nt, Artificial Sequence
  Description of Artificial Sequence: Synthetic oligonucleotide
uuaaggaccgucugagcgg

SEQ ID NO: 3212 - RNA, 19 nt, Artificial Sequence
  Description of Artificial Sequence: Synthetic oligonucleotide
uuuaaggaccgucugagcg

SEQ ID NO: 3213 - RNA, 19 nt, Artificial Sequence
  Description of Artificial Sequence: Synthetic oligonucleotide
uuuuaaggaccgucugagc

SEQ ID NO: 3214 - RNA, 19 nt, Artificial Sequence
  Description of Artificial Sequence: Synthetic oligonucleotide
guuuuaaggaccgucugag

SEQ ID NO: 3215 - RNA, 19 nt, Artificial Sequence
  Description of Artificial Sequence: Synthetic oligonucleotide
cguuuuaaggaccgucuga

SEQ ID NO: 3216 - RNA, 19 nt, Artificial Sequence
  Description of Artificial Sequence: Synthetic oligonucleotide
acguuuuaaggaccgucug

SEQ ID NO: 3217 - RNA, 19 nt, Artificial Sequence
  Description of Artificial Sequence: Synthetic oligonucleotide
gacguuuuaaggaccgucu

SEQ ID NO: 3218 - RNA, 19 nt, Artificial Sequence
  Description of Artificial Sequence: Synthetic oligonucleotide
agacguuuuaaggaccguc

SEQ ID NO: 3219 - RNA, 19 nt, Artificial Sequence
  Description of Artificial Sequence: Synthetic oligonucleotide
cagacguuuuaaggaccgu

SEQ ID NO: 3220 - RNA, 19 nt, Artificial Sequence
  Description of Artificial Sequence: Synthetic oligonucleotide
ucagacguuuuaaggaccg

SEQ ID NO: 3221 - RNA, 19 nt, Artificial Sequence
  Description of Artificial Sequence: Synthetic oligonucleotide
uucagacguuuuaaggacc

SEQ ID NO: 3222 - RNA, 19 nt, Artificial Sequence
  Description of Artificial Sequence: Synthetic oligonucleotide
uuucagacguuuuaaggac

SEQ ID NO: 3223 - RNA, 19 nt, Artificial Sequence
  Description of Artificial Sequence: Synthetic oligonucleotide
cuuucagacguuuuaagga

SEQ ID NO: 3224 - RNA, 19 nt, Artificial Sequence
  Description of Artificial Sequence: Synthetic oligonucleotide
ccuuucagacguuuuaagg

SEQ ID NO: 3225 - RNA, 19 nt, Artificial Sequence
  Description of Artificial Sequence: Synthetic oligonucleotide
gccuuucagacguuuuaag

SEQ ID NO: 3226 - RNA, 19 nt, Artificial Sequence
  Description of Artificial Sequence: Synthetic oligonucleotide
ggccuuucagacguuuuaa

SEQ ID NO: 3227 - RNA, 19 nt, Artificial Sequence
  Description of Artificial Sequence: Synthetic oligonucleotide
cggccuuucagacguuuua

SEQ ID NO: 3228 - RNA, 19 nt, Artificial Sequence
  Description of Artificial Sequence: Synthetic oligonucleotide
acggccuuucagacguuuu

SEQ ID NO: 3229 - RNA, 19 nt, Artificial Sequence
  Description of Artificial Sequence: Synthetic oligonucleotide
aacggccuuucagacguuu

SEQ ID NO: 3230 - RNA, 19 nt, Artificial Sequence
  Description of Artificial Sequence: Synthetic oligonucleotide
gaacggccuuucagacguu

SEQ ID NO: 3231 - RNA, 19 nt, Artificial Sequence
  Description of Artificial Sequence: Synthetic oligonucleotide
ggaacggccuuucagacgu

SEQ ID NO: 3232 - RNA, 19 nt, Artificial Sequence
  Description of Artificial Sequence: Synthetic oligonucleotide
aggaacggccuuucagacg

SEQ ID NO: 3233 - RNA, 19 nt, Artificial Sequence
  Description of Artificial Sequence: Synthetic oligonucleotide
caggaacggccuuucagac

SEQ ID NO: 3234 - RNA, 19 nt, Artificial Sequence
  Description of Artificial Sequence: Synthetic oligonucleotide
gcaggaacggccuuucaga

SEQ ID NO: 3235 - RNA, 19 nt, Artificial Sequence
  Description of Artificial Sequence: Synthetic oligonucleotide
ggcaggaacggccuuucag

SEQ ID NO: 3236 - RNA, 19 nt, Artificial Sequence
  Description of Artificial Sequence: Synthetic oligonucleotide
uggcaggaacggccuuuca

SEQ ID NO: 3237 - RNA, 19 nt, Artificial Sequence
  Description of Artificial Sequence: Synthetic oligonucleotide
cuggcaggaacggccuuuc

SEQ ID NO: 3238 - RNA, 19 nt, Artificial Sequence
  Description of Artificial Sequence: Synthetic oligonucleotide
ucuggcaggaacggccuuu

SEQ ID NO: 3239 - RNA, 19 nt, Artificial Sequence
  Description of Artificial Sequence: Synthetic oligonucleotide
cucuggcaggaacggccuu

SEQ ID NO: 3240 - RNA, 19 nt, Artificial Sequence
  Description of Artificial Sequence: Synthetic oligonucleotide
acucuggcaggaacggccu

SEQ ID NO: 3241 - RNA, 19 nt, Artificial Sequence
  Description of Artificial Sequence: Synthetic oligonucleotide
gacucuggcaggaacggcc

SEQ ID NO: 3242 - RNA, 19 nt, Artificial Sequence
  Description of Artificial Sequence: Synthetic oligonucleotide
ggacucuggcaggaacggc

SEQ ID NO: 3243 - RNA, 19 nt, Artificial Sequence
  Description of Artificial Sequence: Synthetic oligonucleotide
gggacucuggcaggaacgg

SEQ ID NO: 3244 - RNA, 19 nt, Artificial Sequence
  Description of Artificial Sequence: Synthetic oligonucleotide
agggacucuggcaggaacg

SEQ ID NO: 3245 - RNA, 19 nt, Artificial Sequence
  Description of Artificial Sequence: Synthetic oligonucleotide
cagggacucuggcaggaac

SEQ ID NO: 3246 - RNA, 19 nt, Artificial Sequence
  Description of Artificial Sequence: Synthetic oligonucleotide
gcagggacucuggcaggaa

SEQ ID NO: 3247 - RNA, 19 nt, Artificial Sequence
  Description of Artificial Sequence: Synthetic oligonucleotide
agcagggacucuggcagga

SEQ ID NO: 3248 - RNA, 19 nt, Artificial Sequence
  Description of Artificial Sequence: Synthetic oligonucleotide
uagcagggacucuggcagg

SEQ ID NO: 3249 - RNA, 19 nt, Artificial Sequence
  Description of Artificial Sequence: Synthetic oligonucleotide
guagcagggacucuggcag

SEQ ID NO: 3250 - RNA, 19 nt, Artificial Sequence
  Description of Artificial Sequence: Synthetic oligonucleotide
gguagcagggacucuggca

SEQ ID NO: 3251 - RNA, 19 nt, Artificial Sequence
  Description of Artificial Sequence: Synthetic oligonucleotide
agguagcagggacucuggc

SEQ ID NO: 3252 - RNA, 19 nt, Artificial Sequence
  Description of Artificial Sequence: Synthetic oligonucleotide
cagguagcagggacucugg

SEQ ID NO: 3253 - RNA, 19 nt, Artificial Sequence
  Description of Artificial Sequence: Synthetic oligonucleotide
acagguagcagggacucug

SEQ ID NO: 3254 - RNA, 19 nt, Artificial Sequence
  Description of Artificial Sequence: Synthetic oligonucleotide
aacagguagcagggacucu

SEQ ID NO: 3255 - RNA, 19 nt, Artificial Sequence
  Description of Artificial Sequence: Synthetic oligonucleotide
uaacagguagcagggacuc

SEQ ID NO: 3256 - RNA, 19 nt, Artificial Sequence
  Description of Artificial Sequence: Synthetic oligonucleotide
guaacagguagcagggacu

SEQ ID NO: 3257 - RNA, 19 nt, Artificial Sequence
  Description of Artificial Sequence: Synthetic oligonucleotide
gguaacagguagcagggac

SEQ ID NO: 3258 - RNA, 19 nt, Artificial Sequence
  Description of Artificial Sequence: Synthetic oligonucleotide
agguaacagguagcaggga

SEQ ID NO: 3259 - RNA, 19 nt, Artificial Sequence
  Description of Artificial Sequence: Synthetic oligonucleotide
gagguaacagguagcaggg

SEQ ID NO: 3260 - RNA, 19 nt, Artificial Sequence
  Description of Artificial Sequence: Synthetic oligonucleotide
ggagguaacagguagcagg

SEQ ID NO: 3261 - RNA, 19 nt, Artificial Sequence
  Description of Artificial Sequence: Synthetic oligonucleotide
uggagguaacagguagcag

SEQ ID NO: 3262 - RNA, 19 nt, Artificial Sequence
  Description of Artificial Sequence: Synthetic oligonucleotide
guggagguaacagguagca

SEQ ID NO: 3263 - RNA, 19 nt, Artificial Sequence
  Description of Artificial Sequence: Synthetic oligonucleotide
gguggagguaacagguagc

SEQ ID NO: 3264 - RNA, 19 nt, Artificial Sequence
  Description of Artificial Sequence: Synthetic oligonucleotide
ggguggagguaacagguag

SEQ ID NO: 3265 - RNA, 19 nt, Artificial Sequence
  Description of Artificial Sequence: Synthetic oligonucleotide
gggguggagguaacaggua

SEQ ID NO: 3266 - RNA, 19 nt, Artificial Sequence
  Description of Artificial Sequence: Synthetic oligonucleotide
agggguggagguaacaggu

SEQ ID NO: 3267 - RNA, 19 nt, Artificial Sequence
  Description of Artificial Sequence: Synthetic oligonucleotide
uagggguggagguaacagg

SEQ ID NO: 3268 - RNA, 19 nt, Artificial Sequence
  Description of Artificial Sequence: Synthetic oligonucleotide
auagggguggagguaacag

SEQ ID NO: 3269 - RNA, 19 nt, Artificial Sequence
  Description of Artificial Sequence: Synthetic oligonucleotide
aauagggguggagguaaca

SEQ ID NO: 3270 - RNA, 19 nt, Artificial Sequence
  Description of Artificial Sequence: Synthetic oligonucleotide
aaauagggguggagguaac

SEQ ID NO: 3271 - RNA, 19 nt, Artificial Sequence
  Description of Artificial Sequence: Synthetic oligonucleotide
uaaauagggguggagguaa

SEQ ID NO: 3272 - RNA, 19 nt, Artificial Sequence
  Description of Artificial Sequence: Synthetic oligonucleotide
cuaaauagggguggaggua

SEQ ID NO: 3273 - RNA, 19 nt, Artificial Sequence
  Description of Artificial Sequence: Synthetic oligonucleotide
acuaaauagggguggaggu

SEQ ID NO: 3274 - RNA, 19 nt, Artificial Sequence
  Description of Artificial Sequence: Synthetic oligonucleotide
gacuaaauagggguggagg

SEQ ID NO: 3275 - RNA, 19 nt, Artificial Sequence
  Description of Artificial Sequence: Synthetic oligonucleotide
ggacuaaauagggguggag

SEQ ID NO: 3276 - RNA, 19 nt, Artificial Sequence
  Description of Artificial Sequence: Synthetic oligonucleotide
aggacuaaauaggggugga

SEQ ID NO: 3277 - RNA, 19 nt, Artificial Sequence
  Description of Artificial Sequence: Synthetic oligonucleotide
uaggacuaaauaggggugg

SEQ ID NO: 3278 - RNA, 19 nt, Artificial Sequence
  Description of Artificial Sequence: Synthetic oligonucleotide
cuaggacuaaauaggggug

SEQ ID NO: 3279 - RNA, 19 nt, Artificial Sequence
  Description of Artificial Sequence: Synthetic oligonucleotide
acuaggacuaaauaggggu

SEQ ID NO: 3280 - RNA, 19 nt, Artificial Sequence
  Description of Artificial Sequence: Synthetic oligonucleotide
cacuaggacuaaauagggg

SEQ ID NO: 3281 - RNA, 19 nt, Artificial Sequence
  Description of Artificial Sequence: Synthetic oligonucleotide
ccacuaggacuaaauaggg

SEQ ID NO: 3282 - RNA, 19 nt, Artificial Sequence
  Description of Artificial Sequence: Synthetic oligonucleotide
uccacuaggacuaaauagg

SEQ ID NO: 3283 - RNA, 19 nt, Artificial Sequence
  Description of Artificial Sequence: Synthetic oligonucleotide
guccacuaggacuaaauag

SEQ ID NO: 3284 - RNA, 19 nt, Artificial Sequence
  Description of Artificial Sequence: Synthetic oligonucleotide
uguccacuaggacuaaaua

SEQ ID NO: 3285 - RNA, 19 nt, Artificial Sequence
  Description of Artificial Sequence: Synthetic oligonucleotide
cuguccacuaggacuaaau

SEQ ID NO: 3286 - RNA, 19 nt, Artificial Sequence
  Description of Artificial Sequence: Synthetic oligonucleotide
gcuguccacuaggacuaaa

SEQ ID NO: 3287 - RNA, 19 nt, Artificial Sequence
  Description of Artificial Sequence: Synthetic oligonucleotide
ggcuguccacuaggacuaa

SEQ ID NO: 3288 - RNA, 19 nt, Artificial Sequence
  Description of Artificial Sequence: Synthetic oligonucleotide
aggcuguccacuaggacua

SEQ ID NO: 3289 - RNA, 19 nt, Artificial Sequence
  Description of Artificial Sequence: Synthetic oligonucleotide
gaggcuguccacuaggacu

SEQ ID NO: 3290 - RNA, 19 nt, Artificial Sequence
  Description of Artificial Sequence: Synthetic oligonucleotide
cgaggcuguccacuaggac

SEQ ID NO: 3291 - RNA, 19 nt, Artificial Sequence
  Description of Artificial Sequence: Synthetic oligonucleotide
gcgaggcuguccacuagga

SEQ ID NO: 3292 - RNA, 19 nt, Artificial Sequence
  Description of Artificial Sequence: Synthetic oligonucleotide
agcgaggcuguccacuagg

SEQ ID NO: 3293 - RNA, 19 nt, Artificial Sequence
  Description of Artificial Sequence: Synthetic oligonucleotide
gagcgaggcuguccacuag

SEQ ID NO: 3294 - RNA, 19 nt, Artificial Sequence
  Description of Artificial Sequence: Synthetic oligonucleotide
ugagcgaggcuguccacua

SEQ ID NO: 3295 - RNA, 19 nt, Artificial Sequence
  Description of Artificial Sequence: Synthetic oligonucleotide
gugagcgaggcuguccacu

SEQ ID NO: 3296 - RNA, 19 nt, Artificial Sequence
  Description of Artificial Sequence: Synthetic oligonucleotide
ggugagcgaggcuguccac

SEQ ID NO: 3297 - RNA, 19 nt, Artificial Sequence
  Description of Artificial Sequence: Synthetic oligonucleotide
aggugagcgaggcugucca

SEQ ID NO: 3298 - RNA, 19 nt, Artificial Sequence
  Description of Artificial Sequence: Synthetic oligonucleotide
aaggugagcgaggcugucc

SEQ ID NO: 3299 - RNA, 19 nt, Artificial Sequence
  Description of Artificial Sequence: Synthetic oligonucleotide
gaaggugagcgaggcuguc

SEQ ID NO: 3300 - RNA, 19 nt, Artificial Sequence
  Description of Artificial Sequence: Synthetic oligonucleotide
ggaaggugagcgaggcugu

SEQ ID NO: 3301 - RNA, 19 nt, Artificial Sequence
  Description of Artificial Sequence: Synthetic oligonucleotide
gggaaggugagcgaggcug

SEQ ID NO: 3302 - RNA, 19 nt, Artificial Sequence
  Description of Artificial Sequence: Synthetic oligonucleotide
agggaaggugagcgaggcu

SEQ ID NO: 3303 - RNA, 19 nt, Artificial Sequence
  Description of Artificial Sequence: Synthetic oligonucleotide
cagggaaggugagcgaggc

SEQ ID NO: 3304 - RNA, 19 nt, Artificial Sequence
  Description of Artificial Sequence: Synthetic oligonucleotide
ccagggaaggugagcgagg

SEQ ID NO: 3305 - RNA, 19 nt, Artificial Sequence
  Description of Artificial Sequence: Synthetic oligonucleotide
cccagggaaggugagcgag

SEQ ID NO: 3306 - RNA, 19 nt, Artificial Sequence
  Description of Artificial Sequence: Synthetic oligonucleotide
ucccagggaaggugagcga

SEQ ID NO: 3307 - RNA, 19 nt, Artificial Sequence
  Description of Artificial Sequence: Synthetic oligonucleotide
aucccagggaaggugagcg

SEQ ID NO: 3308 - RNA, 19 nt, Artificial Sequence
  Description of Artificial Sequence: Synthetic oligonucleotide
caucccagggaaggugagc

SEQ ID NO: 3309 - RNA, 19 nt, Artificial Sequence
  Description of Artificial Sequence: Synthetic oligonucleotide
ucaucccagggaaggugag

SEQ ID NO: 3310 - RNA, 19 nt, Artificial Sequence
  Description of Artificial Sequence: Synthetic oligonucleotide
gucaucccagggaagguga

SEQ ID NO: 3311 - RNA, 19 nt, Artificial Sequence
  Description of Artificial Sequence: Synthetic oligonucleotide
ugucaucccagggaaggug

SEQ ID NO: 3312 - RNA, 19 nt, Artificial Sequence
  Description of Artificial Sequence: Synthetic oligonucleotide
gugucaucccagggaaggu

SEQ ID NO: 3313 - RNA, 19 nt, Artificial Sequence
  Description of Artificial Sequence: Synthetic oligonucleotide
agugucaucccagggaagg

SEQ ID NO: 3314 - RNA, 19 nt, Artificial Sequence
  Description of Artificial Sequence: Synthetic oligonucleotide
aagugucaucccagggaag

SEQ ID NO: 3315 - RNA, 19 nt, Artificial Sequence
  Description of Artificial Sequence: Synthetic oligonucleotide
gaagugucaucccagggaa

SEQ ID NO: 3316 - RNA, 19 nt, Artificial Sequence
  Description of Artificial Sequence: Synthetic oligonucleotide
agaagugucaucccaggga

SEQ ID NO: 3317 - RNA, 19 nt, Artificial Sequence
  Description of Artificial Sequence: Synthetic oligonucleotide
cagaagugucaucccaggg

SEQ ID NO: 3318 - RNA, 19 nt, Artificial Sequence
  Description of Artificial Sequence: Synthetic oligonucleotide
ccagaagugucaucccagg

SEQ ID NO: 3319 - RNA, 19 nt, Artificial Sequence
  Description of Artificial Sequence: Synthetic oligonucleotide
gccagaagugucaucccag

SEQ ID NO: 3320 - RNA, 19 nt, Artificial Sequence
  Description of Artificial Sequence: Synthetic oligonucleotide
cgccagaagugucauccca

SEQ ID NO: 3321 - RNA, 19 nt, Artificial Sequence
  Description of Artificial Sequence: Synthetic oligonucleotide
ccgccagaagugucauccc

SEQ ID NO: 3322 - RNA, 19 nt, Artificial Sequence
  Description of Artificial Sequence: Synthetic oligonucleotide
gccgccagaagugucaucc

SEQ ID NO: 3323 - RNA, 19 nt, Artificial Sequence
  Description of Artificial Sequence: Synthetic oligonucleotide
agccgccagaagugucauc

SEQ ID NO: 3324 - RNA, 19 nt, Artificial Sequence
  Description of Artificial Sequence: Synthetic oligonucleotide
cagccgccagaagugucau

SEQ ID NO: 3325 - RNA, 19 nt, Artificial Sequence
  Description of Artificial Sequence: Synthetic oligonucleotide
ucagccgccagaaguguca

SEQ ID NO: 3326 - RNA, 19 nt, Artificial Sequence
  Description of Artificial Sequence: Synthetic oligonucleotide
cucagccgccagaaguguc

SEQ ID NO: 3327 - RNA, 19 nt, Artificial Sequence
  Description of Artificial Sequence: Synthetic oligonucleotide
ucucagccgccagaagugu

SEQ ID NO: 3328 - RNA, 19 nt, Artificial Sequence
  Description of Artificial Sequence: Synthetic oligonucleotide
aucucagccgccagaagug

SEQ ID NO: 3329 - RNA, 19 nt, Artificial Sequence
  Description of Artificial Sequence: Synthetic oligonucleotide
caucucagccgccagaagu

SEQ ID NO: 3330 - RNA, 19 nt, Artificial Sequence
  Description of Artificial Sequence: Synthetic oligonucleotide
ucaucucagccgccagaag

SEQ ID NO: 3331 - RNA, 19 nt, Artificial Sequence
  Description of Artificial Sequence: Synthetic oligonucleotide
cucaucucagccgccagaa

SEQ ID NO: 3332 - RNA, 19 nt, Artificial Sequence
  Description of Artificial Sequence: Synthetic oligonucleotide
gcucaucucagccgccaga

SEQ ID NO: 3333 - RNA, 19 nt, Artificial Sequence
  Description of Artificial Sequence: Synthetic oligonucleotide
cgcucaucucagccgccag

SEQ ID NO: 3334 - RNA, 19 nt, Artificial Sequence
  Description of Artificial Sequence: Synthetic oligonucleotide
ucgcucaucucagccgcca

SEQ ID NO: 3335 - RNA, 19 nt, Artificial Sequence
  Description of Artificial Sequence: Synthetic oligonucleotide
cucgcucaucucagccgcc

SEQ ID NO: 3336 - RNA, 19 nt, Artificial Sequence
  Description of Artificial Sequence: Synthetic oligonucleotide
gcucgcucaucucagccgc

SEQ ID NO: 3337 - RNA, 19 nt, Artificial Sequence
  Description of Artificial Sequence: Synthetic oligonucleotide
ggcucgcucaucucagccg

SEQ ID NO: 3338 - RNA, 19 nt, Artificial Sequence
  Description of Artificial Sequence: Synthetic oligonucleotide
aggcucgcucaucucagcc

SEQ ID NO: 3339 - RNA, 19 nt, Artificial Sequence
  Description of Artificial Sequence: Synthetic oligonucleotide
gaggcucgcucaucucagc

SEQ ID NO: 3340 - RNA, 19 nt, Artificial Sequence
  Description of Artificial Sequence: Synthetic oligonucleotide
agaggcucgcucaucucag

SEQ ID NO: 3341 - RNA, 19 nt, Artificial Sequence
  Description of Artificial Sequence: Synthetic oligonucleotide
gagaggcucgcucaucuca

SEQ ID NO: 3342 - RNA, 19 nt, Artificial Sequence
  Description of Artificial Sequence: Synthetic oligonucleotide
agagaggcucgcucaucuc

SEQ ID NO: 3343 - RNA, 19 nt, Artificial Sequence
  Description of Artificial Sequence: Synthetic oligonucleotide
cagagaggcucgcucaucu

SEQ ID NO: 3344 - RNA, 19 nt, Artificial Sequence
  Description of Artificial Sequence: Synthetic oligonucleotide
ccagagaggcucgcucauc

SEQ ID NO: 3345 - RNA, 19 nt, Artificial Sequence
  Description of Artificial Sequence: Synthetic oligonucleotide
cccagagaggcucgcucau

SEQ ID NO: 3346 - RNA, 19 nt, Artificial Sequence
  Description of Artificial Sequence: Synthetic oligonucleotide
gcccagagaggcucgcuca

SEQ ID NO: 3347 - RNA, 19 nt, Artificial Sequence
  Description of Artificial Sequence: Synthetic oligonucleotide
agcccagagaggcucgcuc

SEQ ID NO: 3348 - RNA, 19 nt, Artificial Sequence
  Description of Artificial Sequence: Synthetic oligonucleotide
gagcccagagaggcucgcu

SEQ ID NO: 3349 - RNA, 19 nt, Artificial Sequence
  Description of Artificial Sequence: Synthetic oligonucleotide
agagcccagagaggcucgc

SEQ ID NO: 3350 - RNA, 19 nt, Artificial Sequence
  Description of Artificial Sequence: Synthetic oligonucleotide
cagagcccagagaggcucg

SEQ ID NO: 3351 - RNA, 19 nt, Artificial Sequence
  Description of Artificial Sequence: Synthetic oligonucleotide
gcagagcccagagaggcuc

SEQ ID NO: 3352 - RNA, 19 nt, Artificial Sequence
  Description of Artificial Sequence: Synthetic oligonucleotide
ggcagagcccagagaggcu

SEQ ID NO: 3353 - RNA, 19 nt, Artificial Sequence
  Description of Artificial Sequence: Synthetic oligonucleotide
cggcagagcccagagaggc

SEQ ID NO: 3354 - RNA, 19 nt, Artificial Sequence
  Description of Artificial Sequence: Synthetic oligonucleotide
gcggcagagcccagagagg

SEQ ID NO: 3355 - RNA, 19 nt, Artificial Sequence
  Description of Artificial Sequence: Synthetic oligonucleotide
ggcggcagagcccagagag

SEQ ID NO: 3356 - RNA, 19 nt, Artificial Sequence
  Description of Artificial Sequence: Synthetic oligonucleotide
cggcggcagagcccagaga

SEQ ID NO: 3357 - RNA, 19 nt, Artificial Sequence
  Description of Artificial Sequence: Synthetic oligonucleotide
ccggcggcagagcccagag

SEQ ID NO: 3358 - RNA, 19 nt, Artificial Sequence
  Description of Artificial Sequence: Synthetic oligonucleotide
cccggcggcagagcccaga

SEQ ID NO: 3359 - RNA, 19 nt, Artificial Sequence
  Description of Artificial Sequence: Synthetic oligonucleotide
acccggcggcagagcccag

SEQ ID NO: 3360 - RNA, 19 nt, Artificial Sequence
  Description of Artificial Sequence: Synthetic oligonucleotide
cacccggcggcagagccca

SEQ ID NO: 3361 - RNA, 19 nt, Artificial Sequence
  Description of Artificial Sequence: Synthetic oligonucleotide
acacccggcggcagagccc

SEQ ID NO: 3362 - RNA, 19 nt, Artificial Sequence
  Description of Artificial Sequence: Synthetic oligonucleotide
cacacccggcggcagagcc

SEQ ID NO: 3363 - RNA, 19 nt, Artificial Sequence
  Description of Artificial Sequence: Synthetic oligonucleotide
ccacacccggcggcagagc

SEQ ID NO: 3364 - RNA, 19 nt, Artificial Sequence
  Description of Artificial Sequence: Synthetic oligonucleotide
cccacacccggcggcagag

SEQ ID NO: 3365 - RNA, 19 nt, Artificial Sequence
  Description of Artificial Sequence: Synthetic oligonucleotide
gcccacacccggcggcaga

SEQ ID NO: 3366 - RNA, 19 nt, Artificial Sequence
  Description of Artificial Sequence: Synthetic oligonucleotide
agcccacacccggcggcag

SEQ ID NO: 3367 - RNA, 19 nt, Artificial Sequence
  Description of Artificial Sequence: Synthetic oligonucleotide
cagcccacacccggcggca

SEQ ID NO: 3368 - RNA, 19 nt, Artificial Sequence
  Description of Artificial Sequence: Synthetic oligonucleotide
ucagcccacacccggcggc

SEQ ID NO: 3369 - RNA, 19 nt, Artificial Sequence
  Description of Artificial Sequence: Synthetic oligonucleotide
gucagcccacacccggcgg

SEQ ID NO: 3370 - RNA, 19 nt, Artificial Sequence
  Description of Artificial Sequence: Synthetic oligonucleotide
ggucagcccacacccggcg

SEQ ID NO: 3371 - RNA, 19 nt, Artificial Sequence
  Description of Artificial Sequence: Synthetic oligonucleotide
aggucagcccacacccggc

SEQ ID NO: 3372 - RNA, 19 nt, Artificial Sequence
  Description of Artificial Sequence: Synthetic oligonucleotide
caggucagcccacacccgg

SEQ ID NO: 3373 - RNA, 19 nt, Artificial Sequence
  Description of Artificial Sequence: Synthetic oligonucleotide
gcaggucagcccacacccg

SEQ ID NO: 3374 - RNA, 19 nt, Artificial Sequence
  Description of Artificial Sequence: Synthetic oligonucleotide
ggcaggucagcccacaccc

SEQ ID NO: 3375 - RNA, 19 nt, Artificial Sequence
  Description of Artificial Sequence: Synthetic oligonucleotide
aggcaggucagcccacacc

SEQ ID NO: 3376 - RNA, 19 nt, Artificial Sequence
  Description of Artificial Sequence: Synthetic oligonucleotide
uaggcaggucagcccacac

SEQ ID NO: 3377 - RNA, 19 nt, Artificial Sequence
  Description of Artificial Sequence: Synthetic oligonucleotide
guaggcaggucagcccaca

SEQ ID NO: 3378 - RNA, 19 nt, Artificial Sequence
  Description of Artificial Sequence: Synthetic oligonucleotide
uguaggcaggucagcccac

SEQ ID NO: 3379 - RNA, 19 nt, Artificial Sequence
  Description of Artificial Sequence: Synthetic oligonucleotide
cuguaggcaggucagccca

SEQ ID NO: 3380 - RNA, 19 nt, Artificial Sequence
  Description of Artificial Sequence: Synthetic oligonucleotide
gcuguaggcaggucagccc

SEQ ID NO: 3381 - RNA, 19 nt, Artificial Sequence
  Description of Artificial Sequence: Synthetic oligonucleotide
agcuguaggcaggucagcc

SEQ ID NO: 3382 - RNA, 19 nt, Artificial Sequence
  Description of Artificial Sequence: Synthetic oligonucleotide
cagcuguaggcaggucagc

SEQ ID NO: 3383 - RNA, 19 nt, Artificial Sequence
  Description of Artificial Sequence: Synthetic oligonucleotide
ccagcuguaggcaggucag

SEQ ID NO: 3384 - RNA, 19 nt, Artificial Sequence
  Description of Artificial Sequence: Synthetic oligonucleotide
cccagcuguaggcagguca

SEQ ID NO: 3385 - RNA, 19 nt, Artificial Sequence
  Description of Artificial Sequence: Synthetic oligonucleotide
ccccagcuguaggcagguc

SEQ ID NO: 3386 - RNA, 19 nt, Artificial Sequence
  Description of Artificial Sequence: Synthetic oligonucleotide
gccccagcuguaggcaggu

SEQ ID NO: 3387 - RNA, 19 nt, Artificial Sequence
  Description of Artificial Sequence: Synthetic oligonucleotide
ggccccagcuguaggcagg

SEQ ID NO: 3388 - RNA, 19 nt, Artificial Sequence
  Description of Artificial Sequence: Synthetic oligonucleotide
aggccccagcuguaggcag

SEQ ID NO: 3389 - RNA, 19 nt, Artificial Sequence
  Description of Artificial Sequence: Synthetic oligonucleotide
caggccccagcuguaggca

SEQ ID NO: 3390 - RNA, 19 nt, Artificial Sequence
  Description of Artificial Sequence: Synthetic oligonucleotide
ucaggccccagcuguaggc

SEQ ID NO: 3391 - RNA, 19 nt, Artificial Sequence
  Description of Artificial Sequence: Synthetic oligonucleotide
aucaggccccagcuguagg

SEQ ID NO: 3392 - RNA, 19 nt, Artificial Sequence
  Description of Artificial Sequence: Synthetic oligonucleotide
uaucaggccccagcuguag

SEQ ID NO: 3393 - RNA, 19 nt, Artificial Sequence
  Description of Artificial Sequence: Synthetic oligonucleotide
uuaucaggccccagcugua

SEQ ID NO: 3394 - RNA, 19 nt, Artificial Sequence
  Description of Artificial Sequence: Synthetic oligonucleotide
cuuaucaggccccagcugu

SEQ ID NO: 3395 - RNA, 19 nt, Artificial Sequence
  Description of Artificial Sequence: Synthetic oligonucleotide
ccuuaucaggccccagcug

SEQ ID NO: 3396 - RNA, 19 nt, Artificial Sequence
  Description of Artificial Sequence: Synthetic oligonucleotide
gccuuaucaggccccagcu

SEQ ID NO: 3397 - RNA, 19 nt, Artificial Sequence
  Description of Artificial Sequence: Synthetic oligonucleotide
ugccuuaucaggccccagc

SEQ ID NO: 3398 - RNA, 19 nt, Artificial Sequence
  Description of Artificial Sequence: Synthetic oligonucleotide
cugccuuaucaggccccag

SEQ ID NO: 3399 - RNA, 19 nt, Artificial Sequence
  Description of Artificial Sequence: Synthetic oligonucleotide
gcugccuuaucaggcccca

SEQ ID NO: 3400 - RNA, 19 nt, Artificial Sequence
  Description of Artificial Sequence: Synthetic oligonucleotide
ugcugccuuaucaggcccc

SEQ ID NO: 3401 - RNA, 19 nt, Artificial Sequence
  Description of Artificial Sequence: Synthetic oligonucleotide
cugcugccuuaucaggccc

SEQ ID NO: 3402 - RNA, 19 nt, Artificial Sequence
  Description of Artificial Sequence: Synthetic oligonucleotide
gcugcugccuuaucaggcc

SEQ ID NO: 3403 - RNA, 19 nt, Artificial Sequence
  Description of Artificial Sequence: Synthetic oligonucleotide
ugcugcugccuuaucaggc

SEQ ID NO: 3404 - RNA, 19 nt, Artificial Sequence
  Description of Artificial Sequence: Synthetic oligonucleotide
uugcugcugccuuaucagg

SEQ ID NO: 3405 - RNA, 19 nt, Artificial Sequence
  Description of Artificial Sequence: Synthetic oligonucleotide
uuugcugcugccuuaucag

SEQ ID NO: 3406 - RNA, 19 nt, Artificial Sequence
  Description of Artificial Sequence: Synthetic oligonucleotide
uuuugcugcugccuuauca

SEQ ID NO: 3407 - RNA, 19 nt, Artificial Sequence
  Description of Artificial Sequence: Synthetic oligonucleotide
cuuuugcugcugccuuauc

SEQ ID NO: 3408 - RNA, 19 nt, Artificial Sequence
  Description of Artificial Sequence: Synthetic oligonucleotide
ccuuuugcugcugccuuau

SEQ ID NO: 3409 - RNA, 19 nt, Artificial Sequence
  Description of Artificial Sequence: Synthetic oligonucleotide
cccuuuugcugcugccuua

SEQ ID NO: 3410 - RNA, 19 nt, Artificial Sequence
  Description of Artificial Sequence: Synthetic oligonucleotide
acccuuuugcugcugccuu

SEQ ID NO: 3411 - RNA, 19 nt, Artificial Sequence
  Description of Artificial Sequence: Synthetic oligonucleotide
cacccuuuugcugcugccu

SEQ ID NO: 3412 - RNA, 19 nt, Artificial Sequence
  Description of Artificial Sequence: Synthetic oligonucleotide
ccacccuuuugcugcugcc

SEQ ID NO: 3413 - RNA, 19 nt, Artificial Sequence
  Description of Artificial Sequence: Synthetic oligonucleotide
uccacccuuuugcugcugc

SEQ ID NO: 3414 - RNA, 19 nt, Artificial Sequence
  Description of Artificial Sequence: Synthetic oligonucleotide
cuccacccuuuugcugcug

SEQ ID NO: 3415 - RNA, 19 nt, Artificial Sequence
  Description of Artificial Sequence: Synthetic oligonucleotide
ccuccacccuuuugcugcu

SEQ ID NO: 3416 - RNA, 19 nt, Artificial Sequence
  Description of Artificial Sequence: Synthetic oligonucleotide
cccuccacccuuuugcugc

SEQ ID NO: 3417 - RNA, 19 nt, Artificial Sequence
  Description of Artificial Sequence: Synthetic oligonucleotide
ccccuccacccuuuugcug

SEQ ID NO: 3418 - RNA, 19 nt, Artificial Sequence
  Description of Artificial Sequence: Synthetic oligonucleotide
uccccuccacccuuuugcu

SEQ ID NO: 3419 - RNA, 19 nt, Artificial Sequence
  Description of Artificial Sequence: Synthetic oligonucleotide
cuccccuccacccuuuugc

SEQ ID NO: 3420 - RNA, 19 nt, Artificial Sequence
  Description of Artificial Sequence: Synthetic oligonucleotide
ccuccccuccacccuuuug

SEQ ID NO: 3421 - RNA, 19 nt, Artificial Sequence
  Description of Artificial Sequence: Synthetic oligonucleotide
gccuccccuccacccuuuu

SEQ ID NO: 3422 - RNA, 19 nt, Artificial Sequence
  Description of Artificial Sequence: Synthetic oligonucleotide
ugccuccccuccacccuuu

SEQ ID NO: 3423 - RNA, 19 nt, Artificial Sequence
  Description of Artificial Sequence: Synthetic oligonucleotide
cugccuccccuccacccuu

SEQ ID NO: 3424 - RNA, 19 nt, Artificial Sequence
  Description of Artificial Sequence: Synthetic oligonucleotide
acugccuccccuccacccu

SEQ ID NO: 3425 - RNA, 19 nt, Artificial Sequence
  Description of Artificial Sequence: Synthetic oligonucleotide
cacugccuccccuccaccc

SEQ ID NO: 3426 - RNA, 19 nt, Artificial Sequence
  Description of Artificial Sequence: Synthetic oligonucleotide
acacugccuccccuccacc

SEQ ID NO: 3427 - RNA, 19 nt, Artificial Sequence
  Description of Artificial Sequence: Synthetic oligonucleotide
aacacugccuccccuccac

SEQ ID NO: 3428 - RNA, 19 nt, Artificial Sequence
  Description of Artificial Sequence: Synthetic oligonucleotide
caacacugccuccccucca

SEQ ID NO: 3429 - RNA, 19 nt, Artificial Sequence
  Description of Artificial Sequence: Synthetic oligonucleotide
ucaacacugccuccccucc

SEQ ID NO: 3430 - RNA, 19 nt, Artificial Sequence
  Description of Artificial Sequence: Synthetic oligonucleotide
uucaacacugccuccccuc

SEQ ID NO: 3431 - RNA, 19 nt, Artificial Sequence
  Description of Artificial Sequence: Synthetic oligonucleotide
cuucaacacugccuccccu

SEQ ID NO: 3432 - RNA, 19 nt, Artificial Sequence
  Description of Artificial Sequence: Synthetic oligonucleotide
gcuucaacacugccucccc

SEQ ID NO: 3433 - RNA, 19 nt, Artificial Sequence
  Description of Artificial Sequence: Synthetic oligonucleotide
agcuucaacacugccuccc

SEQ ID NO: 3434 - RNA, 19 nt, Artificial Sequence
  Description of Artificial Sequence: Synthetic oligonucleotide
cagcuucaacacugccucc

SEQ ID NO: 3435 - RNA, 19 nt, Artificial Sequence
  Description of Artificial Sequence: Synthetic oligonucleotide
ccagcuucaacacugccuc

SEQ ID NO: 3436 - RNA, 19 nt, Artificial Sequence
  Description of Artificial Sequence: Synthetic oligonucleotide
cccagcuucaacacugccu

SEQ ID NO: 3437 - RNA, 19 nt, Artificial Sequence
  Description of Artificial Sequence: Synthetic oligonucleotide
ccccagcuucaacacugcc

SEQ ID NO: 3438 - RNA, 19 nt, Artificial Sequence
  Description of Artificial Sequence: Synthetic oligonucleotide
gccccagcuucaacacugc

SEQ ID NO: 3439 - RNA, 19 nt, Artificial Sequence
  Description of Artificial Sequence: Synthetic oligonucleotide
ugccccagcuucaacacug

SEQ ID NO: 3440 - RNA, 19 nt, Artificial Sequence
  Description of Artificial Sequence: Synthetic oligonucleotide
uugccccagcuucaacacu

SEQ ID NO: 3441 - RNA, 19 nt, Artificial Sequence
  Description of Artificial Sequence: Synthetic oligonucleotide
cuugccccagcuucaacac

SEQ ID NO: 3442 - RNA, 19 nt, Artificial Sequence
  Description of Artificial Sequence: Synthetic oligonucleotide
acuugccccagcuucaaca

SEQ ID NO: 3443 - RNA, 19 nt, Artificial Sequence
  Description of Artificial Sequence: Synthetic oligonucleotide
uacuugccccagcuucaac

SEQ ID NO: 3444 - RNA, 19 nt, Artificial Sequence
  Description of Artificial Sequence: Synthetic oligonucleotide
uuacuugccccagcuucaa

SEQ ID NO: 3445 - RNA, 19 nt, Artificial Sequence
  Description of Artificial Sequence: Synthetic oligonucleotide
auuacuugccccagcuuca

SEQ ID NO: 3446 - RNA, 19 nt, Artificial Sequence
  Description of Artificial Sequence: Synthetic oligonucleotide
aauuacuugccccagcuuc

SEQ ID NO: 3447 - RNA, 19 nt, Artificial Sequence
  Description of Artificial Sequence: Synthetic oligonucleotide
aaauuacuugccccagcuu

SEQ ID NO: 3448 - RNA, 19 nt, Artificial Sequence
  Description of Artificial Sequence: Synthetic oligonucleotide
aaaauuacuugccccagcu

SEQ ID NO: 3449 - RNA, 19 nt, Artificial Sequence
  Description of Artificial Sequence: Synthetic oligonucleotide
gaaaauuacuugccccagc

SEQ ID NO: 3450 - RNA, 19 nt, Artificial Sequence
  Description of Artificial Sequence: Synthetic oligonucleotide
ggaaaauuacuugccccag

SEQ ID NO: 3451 - RNA, 19 nt, Artificial Sequence
  Description of Artificial Sequence: Synthetic oligonucleotide
gggaaaauuacuugcccca

SEQ ID NO: 3452 - RNA, 19 nt, Artificial Sequence
  Description of Artificial Sequence: Synthetic oligonucleotide
ggggaaaauuacuugcccc

SEQ ID NO: 3453 - RNA, 19 nt, Artificial Sequence
  Description of Artificial Sequence: Synthetic oligonucleotide
uggggaaaauuacuugccc

SEQ ID NO: 3454 - RNA, 19 nt, Artificial Sequence
  Description of Artificial Sequence: Synthetic oligonucleotide
uuggggaaaauuacuugcc

SEQ ID NO: 3455 - RNA, 19 nt, Artificial Sequence
  Description of Artificial Sequence: Synthetic oligonucleotide
auuggggaaaauuacuugc

SEQ ID NO: 3456 - RNA, 19 nt, Artificial Sequence
  Description of Artificial Sequence: Synthetic oligonucleotide
aauuggggaaaauuacuug

SEQ ID NO: 3457 - RNA, 19 nt, Artificial Sequence
  Description of Artificial Sequence: Synthetic oligonucleotide
aaauuggggaaaauuacuu

SEQ ID NO: 3458 - RNA, 19 nt, Artificial Sequence
  Description of Artificial Sequence: Synthetic oligonucleotide
uaaauuggggaaaauuacu

SEQ ID NO: 3459 - RNA, 19 nt, Artificial Sequence
  Description of Artificial Sequence: Synthetic oligonucleotide
guaaauuggggaaaauuac

SEQ ID NO: 3460 - RNA, 19 nt, Artificial Sequence
  Description of Artificial Sequence: Synthetic oligonucleotide
uguaaauuggggaaaauua

SEQ ID NO: 3461 - RNA, 19 nt, Artificial Sequence
  Description of Artificial Sequence: Synthetic oligonucleotide
cuguaaauuggggaaaauu

SEQ ID NO: 3462 - RNA, 19 nt, Artificial Sequence
  Description of Artificial Sequence: Synthetic oligonucleotide
ccuguaaauuggggaaaau

SEQ ID NO: 3463 - RNA, 19 nt, Artificial Sequence
  Description of Artificial Sequence: Synthetic oligonucleotide
cccuguaaauuggggaaaa

SEQ ID NO: 3464 - RNA, 19 nt, Artificial Sequence
  Description of Artificial Sequence: Synthetic oligonucleotide
ucccuguaaauuggggaaa

SEQ ID NO: 3465 - RNA, 19 nt, Artificial Sequence
  Description of Artificial Sequence: Synthetic oligonucleotide
uucccuguaaauuggggaa

SEQ ID NO: 3466 - RNA, 19 nt, Artificial Sequence
  Description of Artificial Sequence: Synthetic oligonucleotide
uuucccuguaaauugggga

SEQ ID NO: 3467 - RNA, 19 nt, Artificial Sequence
  Description of Artificial Sequence: Synthetic oligonucleotide
uuuucccuguaaauugggg

SEQ ID NO: 3468 - RNA, 19 nt, Artificial Sequence
  Description of Artificial Sequence: Synthetic oligonucleotide
uuuuucccuguaaauuggg

SEQ ID NO: 3469 - RNA, 19 nt, Artificial Sequence
  Description of Artificial Sequence: Synthetic oligonucleotide
guuuuucccuguaaauugg

SEQ ID NO: 3470 - RNA, 19 nt, Artificial Sequence
  Description of Artificial Sequence: Synthetic oligonucleotide
gguuuuucccuguaaauug

SEQ ID NO: 3471 - RNA, 19 nt, Artificial Sequence
  Description of Artificial Sequence: Synthetic oligonucleotide
cgguuuuucccuguaaauu

SEQ ID NO: 3472 - RNA, 19 nt, Artificial Sequence
  Description of Artificial Sequence: Synthetic oligonucleotide
ucgguuuuucccuguaaau

SEQ ID NO: 3473 - RNA, 19 nt, Artificial Sequence
  Description of Artificial Sequence: Synthetic oligonucleotide
uucgguuuuucccuguaaa

SEQ ID NO: 3474 - RNA, 19 nt, Artificial Sequence
  Description of Artificial Sequence: Synthetic oligonucleotide
uuucgguuuuucccuguaa

SEQ ID NO: 3475 - RNA, 19 nt, Artificial Sequence
  Description of Artificial Sequence: Synthetic oligonucleotide
auuucgguuuuucccugua

SEQ ID NO: 3476 - RNA, 19 nt, Artificial Sequence
  Description of Artificial Sequence: Synthetic oligonucleotide
aauuucgguuuuucccugu

SEQ ID NO: 3477 - RNA, 19 nt, Artificial Sequence
  Description of Artificial Sequence: Synthetic oligonucleotide
gaauuucgguuuuucccug

SEQ ID NO: 3478 - RNA, 19 nt, Artificial Sequence
  Description of Artificial Sequence: Synthetic oligonucleotide
ugaauuucgguuuuucccu

SEQ ID NO: 3479 - RNA, 19 nt, Artificial Sequence
  Description of Artificial Sequence: Synthetic oligonucleotide
cugaauuucgguuuuuccc

SEQ ID NO: 3480 - RNA, 19 nt, Artificial Sequence
  Description of Artificial Sequence: Synthetic oligonucleotide
ucugaauuucgguuuuucc

SEQ ID NO: 3481 - RNA, 19 nt, Artificial Sequence
  Description of Artificial Sequence: Synthetic oligonucleotide
uucugaauuucgguuuuuc

SEQ ID NO: 3482 - RNA, 19 nt, Artificial Sequence
  Description of Artificial Sequence: Synthetic oligonucleotide
uuucugaauuucgguuuuu

SEQ ID NO: 3483 - RNA, 19 nt, Artificial Sequence
  Description of Artificial Sequence: Synthetic oligonucleotide
uuuucugaauuucgguuuu

SEQ ID NO: 3484 - RNA, 19 nt, Artificial Sequence
  Description of Artificial Sequence: Synthetic oligonucleotide
cuuuucugaauuucgguuu

SEQ ID NO: 3485 - RNA, 19 nt, Artificial Sequence
  Description of Artificial Sequence: Synthetic oligonucleotide
acuuuucugaauuucgguu

SEQ ID NO: 3486 - RNA, 19 nt, Artificial Sequence
  Description of Artificial Sequence: Synthetic oligonucleotide
aacuuuucugaauuucggu

SEQ ID NO: 3487 - RNA, 19 nt, Artificial Sequence
  Description of Artificial Sequence: Synthetic oligonucleotide
aaacuuuucugaauuucgg

SEQ ID NO: 3488 - RNA, 19 nt, Artificial Sequence
  Description of Artificial Sequence: Synthetic oligonucleotide
uaaacuuuucugaauuucg

SEQ ID NO: 3489 - RNA, 19 nt, Artificial Sequence
  Description of Artificial Sequence: Synthetic oligonucleotide
uuaaacuuuucugaauuuc

SEQ ID NO: 3490 - RNA, 19 nt, Artificial Sequence
  Description of Artificial Sequence: Synthetic oligonucleotide
auuaaacuuuucugaauuu

SEQ ID NO: 3491 - RNA, 19 nt, Artificial Sequence
  Description of Artificial Sequence: Synthetic oligonucleotide
cauuaaacuuuucugaauu

SEQ ID NO: 3492 - RNA, 19 nt, Artificial Sequence
  Description of Artificial Sequence: Synthetic oligonucleotide
acauuaaacuuuucugaau

SEQ ID NO: 3493 - RNA, 19 nt, Artificial Sequence
  Description of Artificial Sequence: Synthetic oligonucleotide
gacauuaaacuuuucugaa

SEQ ID NO: 3494 - RNA, 19 nt, Artificial Sequence
  Description of Artificial Sequence: Synthetic oligonucleotide
ugacauuaaacuuuucuga

SEQ ID NO: 3495 - RNA, 19 nt, Artificial Sequence
  Description of Artificial Sequence: Synthetic oligonucleotide
gugacauuaaacuuuucug

SEQ ID NO: 3496 - RNA, 19 nt, Artificial Sequence
  Description of Artificial Sequence: Synthetic oligonucleotide
ggugacauuaaacuuuucu

SEQ ID NO: 3497 - RNA, 19 nt, Artificial Sequence
  Description of Artificial Sequence: Synthetic oligonucleotide
gggugacauuaaacuuuuc

SEQ ID NO: 3498 - RNA, 19 nt, Artificial Sequence
  Description of Artificial Sequence: Synthetic oligonucleotide
ugggugacauuaaacuuuu

SEQ ID NO: 3499 - RNA, 19 nt, Artificial Sequence
  Description of Artificial Sequence: Synthetic oligonucleotide
cugggugacauuaaacuuu

SEQ ID NO: 3500 - RNA, 19 nt, Artificial Sequence
  Description of Artificial Sequence: Synthetic oligonucleotide
ccugggugacauuaaacuu

SEQ ID NO: 3501 - RNA, 19 nt, Artificial Sequence
  Description of Artificial Sequence: Synthetic oligonucleotide
cccugggugacauuaaacu

SEQ ID NO: 3502 - RNA, 19 nt, Artificial Sequence
  Description of Artificial Sequence: Synthetic oligonucleotide
ccccugggugacauuaaac

SEQ ID NO: 3503 - RNA, 19 nt, Artificial Sequence
  Description of Artificial Sequence: Synthetic oligonucleotide
gccccugggugacauuaaa

SEQ ID NO: 3504 - RNA, 19 nt, Artificial Sequence
  Description of Artificial Sequence: Synthetic oligonucleotide
agccccugggugacauuaa

SEQ ID NO: 3505 - RNA, 19 nt, Artificial Sequence
  Description of Artificial Sequence: Synthetic oligonucleotide
cagccccugggugacauua

SEQ ID NO: 3506 - RNA, 19 nt, Artificial Sequence
  Description of Artificial Sequence: Synthetic oligonucleotide
ccagccccugggugacauu

SEQ ID NO: 3507 - RNA, 19 nt, Artificial Sequence
  Description of Artificial Sequence: Synthetic oligonucleotide
uccagccccugggugacau

SEQ ID NO: 3508 - RNA, 19 nt, Artificial Sequence
  Description of Artificial Sequence: Synthetic oligonucleotide
cuccagccccugggugaca

SEQ ID NO: 3509 - RNA, 19 nt, Artificial Sequence
  Description of Artificial Sequence: Synthetic oligonucleotide
gcuccagccccugggugac

SEQ ID NO: 3510 - RNA, 19 nt, Artificial Sequence
  Description of Artificial Sequence: Synthetic oligonucleotide
ggcuccagccccuggguga

SEQ ID NO: 3511 - RNA, 19 nt, Artificial Sequence
  Description of Artificial Sequence: Synthetic oligonucleotide
gggcuccagccccugggug

SEQ ID NO: 3512 - RNA, 19 nt, Artificial Sequence
  Description of Artificial Sequence: Synthetic oligonucleotide
ugggcuccagccccugggu

SEQ ID NO: 3513 - RNA, 19 nt, Artificial Sequence
  Description of Artificial Sequence: Synthetic oligonucleotide
cugggcuccagccccuggg

SEQ ID NO: 3514 - RNA, 19 nt, Artificial Sequence
  Description of Artificial Sequence: Synthetic oligonucleotide
ucugggcuccagccccugg

SEQ ID NO: 3515 - RNA, 19 nt, Artificial Sequence
  Description of Artificial Sequence: Synthetic oligonucleotide
gucugggcuccagccccug

SEQ ID NO: 3516 - RNA, 19 nt, Artificial Sequence
  Description of Artificial Sequence: Synthetic oligonucleotide
ggucugggcuccagccccu

SEQ ID NO: 3517 - RNA, 19 nt, Artificial Sequence
  Description of Artificial Sequence: Synthetic oligonucleotide
aggucugggcuccagcccc

SEQ ID NO: 3518 - RNA, 19 nt, Artificial Sequence
  Description of Artificial Sequence: Synthetic oligonucleotide
gaggucugggcuccagccc

SEQ ID NO: 3519 - RNA, 19 nt, Artificial Sequence
  Description of Artificial Sequence: Synthetic oligonucleotide
agaggucugggcuccagcc

SEQ ID NO: 3520 - RNA, 19 nt, Artificial Sequence
  Description of Artificial Sequence: Synthetic oligonucleotide
cagaggucugggcuccagc

SEQ ID NO: 3521 - RNA, 19 nt, Artificial Sequence
  Description of Artificial Sequence: Synthetic oligonucleotide
ccagaggucugggcuccag

SEQ ID NO: 3522 - RNA, 19 nt, Artificial Sequence
  Description of Artificial Sequence: Synthetic oligonucleotide
gccagaggucugggcucca

SEQ ID NO: 3523 - RNA, 19 nt, Artificial Sequence
  Description of Artificial Sequence: Synthetic oligonucleotide
ugccagaggucugggcucc

SEQ ID NO: 3524 - RNA, 19 nt, Artificial Sequence
  Description of Artificial Sequence: Synthetic oligonucleotide
cugccagaggucugggcuc

SEQ ID NO: 3525 - RNA, 19 nt, Artificial Sequence
  Description of Artificial Sequence: Synthetic oligonucleotide
gcugccagaggucugggcu

SEQ ID NO: 3526 - RNA, 19 nt, Artificial Sequence
  Description of Artificial Sequence: Synthetic oligonucleotide
agcugccagaggucugggc

SEQ ID NO: 3527 - RNA, 19 nt, Artificial Sequence
  Description of Artificial Sequence: Synthetic oligonucleotide
gagcugccagaggucuggg

SEQ ID NO: 3528 - RNA, 19 nt, Artificial Sequence
  Description of Artificial Sequence: Synthetic oligonucleotide
agagcugccagaggucugg

SEQ ID NO: 3529 - RNA, 19 nt, Artificial Sequence
  Description of Artificial Sequence: Synthetic oligonucleotide
gagagcugccagaggucug

SEQ ID NO: 3530 - RNA, 19 nt, Artificial Sequence
  Description of Artificial Sequence: Synthetic oligonucleotide
ugagagcugccagaggucu

SEQ ID NO: 3531 - RNA, 19 nt, Artificial Sequence
  Description of Artificial Sequence: Synthetic oligonucleotide
gugagagcugccagagguc

SEQ ID NO: 3532 - RNA, 19 nt, Artificial Sequence
  Description of Artificial Sequence: Synthetic oligonucleotide
agugagagcugccagaggu

SEQ ID NO: 3533 - RNA, 19 nt, Artificial Sequence
  Description of Artificial Sequence: Synthetic oligonucleotide
aagugagagcugccagagg

SEQ ID NO: 3534 - RNA, 19 nt, Artificial Sequence
  Description of Artificial Sequence: Synthetic oligonucleotide
aaagugagagcugccagag

SEQ ID NO: 3535 - RNA, 19 nt, Artificial Sequence
  Description of Artificial Sequence: Synthetic oligonucleotide
gaaagugagagcugccaga

SEQ ID NO: 3536 - RNA, 19 nt, Artificial Sequence
  Description of Artificial Sequence: Synthetic oligonucleotide
ugaaagugagagcugccag

SEQ ID NO: 3537 - RNA, 19 nt, Artificial Sequence
  Description of Artificial Sequence: Synthetic oligonucleotide
gugaaagugagagcugcca

SEQ ID NO: 3538 - RNA, 19 nt, Artificial Sequence
  Description of Artificial Sequence: Synthetic oligonucleotide
ugugaaagugagagcugcc

SEQ ID NO: 3539 - RNA, 19 nt, Artificial Sequence
  Description of Artificial Sequence: Synthetic oligonucleotide
uugugaaagugagagcugc

SEQ ID NO: 3540 - RNA, 19 nt, Artificial Sequence
  Description of Artificial Sequence: Synthetic oligonucleotide
auugugaaagugagagcug

SEQ ID NO: 3541 - RNA, 19 nt, Artificial Sequence
  Description of Artificial Sequence: Synthetic oligonucleotide
cauugugaaagugagagcu

SEQ ID NO: 3542 - RNA, 19 nt, Artificial Sequence
  Description of Artificial Sequence: Synthetic oligonucleotide
gcauugugaaagugagagc

SEQ ID NO: 3543 - RNA, 19 nt, Artificial Sequence
  Description of Artificial Sequence: Synthetic oligonucleotide
ggcauugugaaagugagag

SEQ ID NO: 3544 - RNA, 19 nt, Artificial Sequence
  Description of Artificial Sequence: Synthetic oligonucleotide
gggcauugugaaagugaga

SEQ ID NO: 3545 - RNA, 19 nt, Artificial Sequence
  Description of Artificial Sequence: Synthetic oligonucleotide
agggcauugugaaagugag

SEQ ID NO: 3546 - RNA, 19 nt, Artificial Sequence
  Description of Artificial Sequence: Synthetic oligonucleotide
aagggcauugugaaaguga

SEQ ID NO: 3547 - RNA, 19 nt, Artificial Sequence
  Description of Artificial Sequence: Synthetic oligonucleotide
caagggcauugugaaagug

SEQ ID NO: 3548 - RNA, 19 nt, Artificial Sequence
  Description of Artificial Sequence: Synthetic oligonucleotide
ccaagggcauugugaaagu

SEQ ID NO: 3549 - RNA, 19 nt, Artificial Sequence
  Description of Artificial Sequence: Synthetic oligonucleotide
cccaagggcauugugaaag

SEQ ID NO: 3550 - RNA, 19 nt, Artificial Sequence
  Description of Artificial Sequence: Synthetic oligonucleotide
gcccaagggcauugugaaa

SEQ ID NO: 3551 - RNA, 19 nt, Artificial Sequence
  Description of Artificial Sequence: Synthetic oligonucleotide
agcccaagggcauugugaa

SEQ ID NO: 3552 - RNA, 19 nt, Artificial Sequence
  Description of Artificial Sequence: Synthetic oligonucleotide
cagcccaagggcauuguga

SEQ ID NO: 3553 - RNA, 19 nt, Artificial Sequence
  Description of Artificial Sequence: Synthetic oligonucleotide
ucagcccaagggcauugug

SEQ ID NO: 3554 - RNA, 19 nt, Artificial Sequence
  Description of Artificial Sequence: Synthetic oligonucleotide
gucagcccaagggcauugu

SEQ ID NO: 3555 - RNA, 19 nt, Artificial Sequence
  Description of Artificial Sequence: Synthetic oligonucleotide
agucagcccaagggcauug

SEQ ID NO: 3556 - RNA, 19 nt, Artificial Sequence
  Description of Artificial Sequence: Synthetic oligonucleotide
uagucagcccaagggcauu

SEQ ID NO: 3557 - RNA, 19 nt, Artificial Sequence
  Description of Artificial Sequence: Synthetic oligonucleotide
cuagucagcccaagggcau

SEQ ID NO: 3558 - RNA, 19 nt, Artificial Sequence
  Description of Artificial Sequence: Synthetic oligonucleotide
ccuagucagcccaagggca

SEQ ID NO: 3559 - RNA, 19 nt, Artificial Sequence
  Description of Artificial Sequence: Synthetic oligonucleotide
gccuagucagcccaagggc

SEQ ID NO: 3560 - RNA, 19 nt, Artificial Sequence
  Description of Artificial Sequence: Synthetic oligonucleotide
agccuagucagcccaaggg

SEQ ID NO: 3561 - RNA, 19 nt, Artificial Sequence
  Description of Artificial Sequence: Synthetic oligonucleotide
cagccuagucagcccaagg

SEQ ID NO: 3562 - RNA, 19 nt, Artificial Sequence
  Description of Artificial Sequence: Synthetic oligonucleotide
gcagccuagucagcccaag

SEQ ID NO: 3563 - RNA, 19 nt, Artificial Sequence
  Description of Artificial Sequence: Synthetic oligonucleotide
ugcagccuagucagcccaa

SEQ ID NO: 3564 - RNA, 19 nt, Artificial Sequence
  Description of Artificial Sequence: Synthetic oligonucleotide
cugcagccuagucagccca

SEQ ID NO: 3565 - RNA, 19 nt, Artificial Sequence
  Description of Artificial Sequence: Synthetic oligonucleotide
ucugcagccuagucagccc

SEQ ID NO: 3566 - RNA, 19 nt, Artificial Sequence
  Description of Artificial Sequence: Synthetic oligonucleotide
cucugcagccuagucagcc

SEQ ID NO: 3567 - RNA, 19 nt, Artificial Sequence
  Description of Artificial Sequence: Synthetic oligonucleotide
ccucugcagccuagucagc

SEQ ID NO: 3568 - RNA, 19 nt, Artificial Sequence
  Description of Artificial Sequence: Synthetic oligonucleotide
cccucugcagccuagucag

SEQ ID NO: 3569 - RNA, 19 nt, Artificial Sequence
  Description of Artificial Sequence: Synthetic oligonucleotide
ccccucugcagccuaguca

SEQ ID NO: 3570 - RNA, 19 nt, Artificial Sequence
  Description of Artificial Sequence: Synthetic oligonucleotide
accccucugcagccuaguc

SEQ ID NO: 3571 - RNA, 19 nt, Artificial Sequence
  Description of Artificial Sequence: Synthetic oligonucleotide
aaccccucugcagccuagu

SEQ ID NO: 3572 - RNA, 19 nt, Artificial Sequence
  Description of Artificial Sequence: Synthetic oligonucleotide
aaaccccucugcagccuag

SEQ ID NO: 3573 - RNA, 19 nt, Artificial Sequence
  Description of Artificial Sequence: Synthetic oligonucleotide
gaaaccccucugcagccua

SEQ ID NO: 3574 - RNA, 19 nt, Artificial Sequence
  Description of Artificial Sequence: Synthetic oligonucleotide
ugaaaccccucugcagccu

SEQ ID NO: 3575 - RNA, 19 nt, Artificial Sequence
  Description of Artificial Sequence: Synthetic oligonucleotide
gugaaaccccucugcagcc

SEQ ID NO: 3576 - RNA, 19 nt, Artificial Sequence
  Description of Artificial Sequence: Synthetic oligonucleotide
ggugaaaccccucugcagc

SEQ ID NO: 3577 - RNA, 19 nt, Artificial Sequence
  Description of Artificial Sequence: Synthetic oligonucleotide
gggugaaaccccucugcag

SEQ ID NO: 3578 - RNA, 19 nt, Artificial Sequence
  Description of Artificial Sequence: Synthetic oligonucleotide
ggggugaaaccccucugca

SEQ ID NO: 3579 - RNA, 19 nt, Artificial Sequence
  Description of Artificial Sequence: Synthetic oligonucleotide
uggggugaaaccccucugc

SEQ ID NO: 3580 - RNA, 19 nt, Artificial Sequence
  Description of Artificial Sequence: Synthetic oligonucleotide
uuggggugaaaccccucug

SEQ ID NO: 3581 - RNA, 19 nt, Artificial Sequence
  Description of Artificial Sequence: Synthetic oligonucleotide
guuggggugaaaccccucu

SEQ ID NO: 3582 - RNA, 19 nt, Artificial Sequence
  Description of Artificial Sequence: Synthetic oligonucleotide
gguuggggugaaaccccuc

SEQ ID NO: 3583 - RNA, 19 nt, Artificial Sequence
  Description of Artificial Sequence: Synthetic oligonucleotide
ggguuggggugaaaccccu

SEQ ID NO: 3584 - RNA, 19 nt, Artificial Sequence
  Description of Artificial Sequence: Synthetic oligonucleotide
gggguuggggugaaacccc

SEQ ID NO: 3585 - RNA, 19 nt, Artificial Sequence
  Description of Artificial Sequence: Synthetic oligonucleotide
ugggguuggggugaaaccc

SEQ ID NO: 3586 - RNA, 19 nt, Artificial Sequence
  Description of Artificial Sequence: Synthetic oligonucleotide
cugggguuggggugaaacc

SEQ ID NO: 3587 - RNA, 19 nt, Artificial Sequence
  Description of Artificial Sequence: Synthetic oligonucleotide
ccugggguuggggugaaac

SEQ ID NO: 3588 - RNA, 19 nt, Artificial Sequence
  Description of Artificial Sequence: Synthetic oligonucleotide
cccugggguuggggugaaa

SEQ ID NO: 3589 - RNA, 19 nt, Artificial Sequence
  Description of Artificial Sequence: Synthetic oligonucleotide
gcccugggguuggggugaa

SEQ ID NO: 3590 - RNA, 19 nt, Artificial Sequence
  Description of Artificial Sequence: Synthetic oligonucleotide
ugcccugggguugggguga

SEQ ID NO: 3591 - RNA, 19 nt, Artificial Sequence
  Description of Artificial Sequence: Synthetic oligonucleotide
gugcccugggguuggggug

SEQ ID NO: 3592 - RNA, 19 nt, Artificial Sequence
  Description of Artificial Sequence: Synthetic oligonucleotide
ggugcccugggguuggggu

SEQ ID NO: 3593 - RNA, 19 nt, Artificial Sequence
  Description of Artificial Sequence: Synthetic oligonucleotide
aggugcccugggguugggg

SEQ ID NO: 3594 - RNA, 19 nt, Artificial Sequence
  Description of Artificial Sequence: Synthetic oligonucleotide
gaggugcccugggguuggg

SEQ ID NO: 3595 - RNA, 19 nt, Artificial Sequence
  Description of Artificial Sequence: Synthetic oligonucleotide
ugaggugcccugggguugg

SEQ ID NO: 3596 - RNA, 19 nt, Artificial Sequence
  Description of Artificial Sequence: Synthetic oligonucleotide
uugaggugcccugggguug

SEQ ID NO: 3597 - RNA, 19 nt, Artificial Sequence
  Description of Artificial Sequence: Synthetic oligonucleotide
cuugaggugcccugggguu

SEQ ID NO: 3598 - RNA, 19 nt, Artificial Sequence
  Description of Artificial Sequence: Synthetic oligonucleotide
acuugaggugcccuggggu

SEQ ID NO: 3599 - RNA, 19 nt, Artificial Sequence
  Description of Artificial Sequence: Synthetic oligonucleotide
cacuugaggugcccugggg

SEQ ID NO: 3600 - RNA, 19 nt, Artificial Sequence
  Description of Artificial Sequence: Synthetic oligonucleotide
acacuugaggugcccuggg

SEQ ID NO: 3601 - RNA, 19 nt, Artificial Sequence
  Description of Artificial Sequence: Synthetic oligonucleotide
gacacuugaggugcccugg

SEQ ID NO: 3602 - RNA, 19 nt, Artificial Sequence
  Description of Artificial Sequence: Synthetic oligonucleotide
ggacacuugaggugcccug

SEQ ID NO: 3603 - RNA, 19 nt, Artificial Sequence
  Description of Artificial Sequence: Synthetic oligonucleotide
gggacacuugaggugcccu

SEQ ID NO: 3604 - RNA, 19 nt, Artificial Sequence
  Description of Artificial Sequence: Synthetic oligonucleotide
ggggacacuugaggugccc

SEQ ID NO: 3605 - RNA, 19 nt, Artificial Sequence
  Description of Artificial Sequence: Synthetic oligonucleotide
uggggacacuugaggugcc

SEQ ID NO: 3606 - RNA, 19 nt, Artificial Sequence
  Description of Artificial Sequence: Synthetic oligonucleotide
guggggacacuugaggugc

SEQ ID NO: 3607 - RNA, 19 nt, Artificial Sequence
  Description of Artificial Sequence: Synthetic oligonucleotide
gguggggacacuugaggug

SEQ ID NO: 3608 - RNA, 19 nt, Artificial Sequence
  Description of Artificial Sequence: Synthetic oligonucleotide
ugguggggacacuugaggu

SEQ ID NO: 3609 - RNA, 19 nt, Artificial Sequence
  Description of Artificial Sequence: Synthetic oligonucleotide
uugguggggacacuugagg

SEQ ID NO: 3610 - RNA, 19 nt, Artificial Sequence
  Description of Artificial Sequence: Synthetic oligonucleotide
uuugguggggacacuugag

SEQ ID NO: 3611 - RNA, 19 nt, Artificial Sequence
  Description of Artificial Sequence: Synthetic oligonucleotide
guuugguggggacacuuga

SEQ ID NO: 3612 - RNA, 19 nt, Artificial Sequence
  Description of Artificial Sequence: Synthetic oligonucleotide
gguuugguggggacacuug

SEQ ID NO: 3613 - RNA, 19 nt, Artificial Sequence
  Description of Artificial Sequence: Synthetic oligonucleotide
agguuugguggggacacuu

SEQ ID NO: 3614 - RNA, 19 nt, Artificial Sequence
  Description of Artificial Sequence: Synthetic oligonucleotide
aagguuugguggggacacu

SEQ ID NO: 3615 - RNA, 19 nt, Artificial Sequence
  Description of Artificial Sequence: Synthetic oligonucleotide
gaagguuugguggggacac

SEQ ID NO: 3616 - RNA, 19 nt, Artificial Sequence
  Description of Artificial Sequence: Synthetic oligonucleotide
ggaagguuugguggggaca

SEQ ID NO: 3617 - RNA, 19 nt, Artificial Sequence
  Description of Artificial Sequence: Synthetic oligonucleotide
aggaagguuugguggggac

SEQ ID NO: 3618 - RNA, 19 nt, Artificial Sequence
  Description of Artificial Sequence: Synthetic oligonucleotide
uaggaagguuuggugggga

SEQ ID NO: 3619 - RNA, 19 nt, Artificial Sequence
  Description of Artificial Sequence: Synthetic oligonucleotide
uuaggaagguuuggugggg

SEQ ID NO: 3620 - RNA, 19 nt, Artificial Sequence
  Description of Artificial Sequence: Synthetic oligonucleotide
guuaggaagguuugguggg

SEQ ID NO: 3621 - RNA, 19 nt, Artificial Sequence
  Description of Artificial Sequence: Synthetic oligonucleotide
uguuaggaagguuuggugg

SEQ ID NO: 3622 - RNA, 19 nt, Artificial Sequence
  Description of Artificial Sequence: Synthetic oligonucleotide
guguuaggaagguuuggug

SEQ ID NO: 3623 - RNA, 19 nt, Artificial Sequence
  Description of Artificial Sequence: Synthetic oligonucleotide
gguguuaggaagguuuggu

SEQ ID NO: 3624 - RNA, 19 nt, Artificial Sequence
  Description of Artificial Sequence: Synthetic oligonucleotide
agguguuaggaagguuugg

SEQ ID NO: 3625 - RNA, 19 nt, Artificial Sequence
  Description of Artificial Sequence: Synthetic oligonucleotide
cagguguuaggaagguuug

SEQ ID NO: 3626 - RNA, 19 nt, Artificial Sequence
  Description of Artificial Sequence: Synthetic oligonucleotide
acagguguuaggaagguuu

SEQ ID NO: 3627 - RNA, 19 nt, Artificial Sequence
  Description of Artificial Sequence: Synthetic oligonucleotide
gacagguguuaggaagguu

SEQ ID NO: 3628 - RNA, 19 nt, Artificial Sequence
  Description of Artificial Sequence: Synthetic oligonucleotide
ggacagguguuaggaaggu

SEQ ID NO: 3629 - RNA, 19 nt, Artificial Sequence
  Description of Artificial Sequence: Synthetic oligonucleotide
uggacagguguuaggaagg

SEQ ID NO: 3630 - RNA, 19 nt, Artificial Sequence
  Description of Artificial Sequence: Synthetic oligonucleotide
guggacagguguuaggaag

SEQ ID NO: 3631 - RNA, 19 nt, Artificial Sequence
  Description of Artificial Sequence: Synthetic oligonucleotide
aguggacagguguuaggaa

SEQ ID NO: 3632 - RNA, 19 nt, Artificial Sequence
  Description of Artificial Sequence: Synthetic oligonucleotide
uaguggacagguguuagga

SEQ ID NO: 3633 - RNA, 19 nt, Artificial Sequence
  Description of Artificial Sequence: Synthetic oligonucleotide
uuaguggacagguguuagg

SEQ ID NO: 3634 - RNA, 19 nt, Artificial Sequence
  Description of Artificial Sequence: Synthetic oligonucleotide
cuuaguggacagguguuag

SEQ ID NO: 3635 - RNA, 19 nt, Artificial Sequence
  Description of Artificial Sequence: Synthetic oligonucleotide
gcuuaguggacagguguua

SEQ ID NO: 3636 - RNA, 19 nt, Artificial Sequence
  Description of Artificial Sequence: Synthetic oligonucleotide
agcuuaguggacagguguu

SEQ ID NO: 3637 - RNA, 19 nt, Artificial Sequence
  Description of Artificial Sequence: Synthetic oligonucleotide
cagcuuaguggacaggugu

SEQ ID NO: 3638 - RNA, 19 nt, Artificial Sequence
  Description of Artificial Sequence: Synthetic oligonucleotide
acagcuuaguggacaggug

SEQ ID NO: 3639 - RNA, 19 nt, Artificial Sequence
  Description of Artificial Sequence: Synthetic oligonucleotide
uacagcuuaguggacaggu

SEQ ID NO: 3640 - RNA, 19 nt, Artificial Sequence
  Description of Artificial Sequence: Synthetic oligonucleotide
guacagcuuaguggacagg

SEQ ID NO: 3641 - RNA, 19 nt, Artificial Sequence
  Description of Artificial Sequence: Synthetic oligonucleotide
aguacagcuuaguggacag

SEQ ID NO: 3642 - RNA, 19 nt, Artificial Sequence
  Description of Artificial Sequence: Synthetic oligonucleotide
uaguacagcuuaguggaca

SEQ ID NO: 3643 - RNA, 19 nt, Artificial Sequence
  Description of Artificial Sequence: Synthetic oligonucleotide
cuaguacagcuuaguggac

SEQ ID NO: 3644 - RNA, 19 nt, Artificial Sequence
  Description of Artificial Sequence: Synthetic oligonucleotide
ccuaguacagcuuagugga

SEQ ID NO: 3645 - RNA, 19 nt, Artificial Sequence
  Description of Artificial Sequence: Synthetic oligonucleotide
gccuaguacagcuuagugg

SEQ ID NO: 3646 - RNA, 19 nt, Artificial Sequence
  Description of Artificial Sequence: Synthetic oligonucleotide
ggccuaguacagcuuagug

SEQ ID NO: 3647 - RNA, 19 nt, Artificial Sequence
  Description of Artificial Sequence: Synthetic oligonucleotide
gggccuaguacagcuuagu

SEQ ID NO: 3648 - RNA, 19 nt, Artificial Sequence
  Description of Artificial Sequence: Synthetic oligonucleotide
agggccuaguacagcuuag

SEQ ID NO: 3649 - RNA, 19 nt, Artificial Sequence
  Description of Artificial Sequence: Synthetic oligonucleotide
aagggccuaguacagcuua

SEQ ID NO: 3650 - RNA, 19 nt, Artificial Sequence
  Description of Artificial Sequence: Synthetic oligonucleotide
caagggccuaguacagcuu

SEQ ID NO: 3651 - RNA, 19 nt, Artificial Sequence
  Description of Artificial Sequence: Synthetic oligonucleotide
gcaagggccuaguacagcu

SEQ ID NO: 3652 - RNA, 19 nt, Artificial Sequence
  Description of Artificial Sequence: Synthetic oligonucleotide
ugcaagggccuaguacagc

SEQ ID NO: 3653 - RNA, 19 nt, Artificial Sequence
  Description of Artificial Sequence: Synthetic oligonucleotide
uugcaagggccuaguacag

SEQ ID NO: 3654 - RNA, 19 nt, Artificial Sequence
  Description of Artificial Sequence: Synthetic oligonucleotide
guugcaagggccuaguaca

SEQ ID NO: 3655 - RNA, 19 nt, Artificial Sequence
  Description of Artificial Sequence: Synthetic oligonucleotide
aguugcaagggccuaguac

SEQ ID NO: 3656 - RNA, 19 nt, Artificial Sequence
  Description of Artificial Sequence: Synthetic oligonucleotide
caguugcaagggccuagua

SEQ ID NO: 3657 - RNA, 19 nt, Artificial Sequence
  Description of Artificial Sequence: Synthetic oligonucleotide
ucaguugcaagggccuagu

SEQ ID NO: 3658 - RNA, 19 nt, Artificial Sequence
  Description of Artificial Sequence: Synthetic oligonucleotide
gucaguugcaagggccuag

SEQ ID NO: 3659 - RNA, 19 nt, Artificial Sequence
  Description of Artificial Sequence: Synthetic oligonucleotide
ggucaguugcaagggccua

SEQ ID NO: 3660 - RNA, 19 nt, Artificial Sequence
  Description of Artificial Sequence: Synthetic oligonucleotide
aggucaguugcaagggccu

SEQ ID NO: 3661 - RNA, 19 nt, Artificial Sequence
  Description of Artificial Sequence: Synthetic oligonucleotide
uaggucaguugcaagggcc

SEQ ID NO: 3662 - RNA, 19 nt, Artificial Sequence
  Description of Artificial Sequence: Synthetic oligonucleotide
auaggucaguugcaagggc

SEQ ID NO: 3663 - RNA, 19 nt, Artificial Sequence
  Description of Artificial Sequence: Synthetic oligonucleotide
cauaggucaguugcaaggg

SEQ ID NO: 3664 - RNA, 19 nt, Artificial Sequence
  Description of Artificial Sequence: Synthetic oligonucleotide
ccauaggucaguugcaagg

SEQ ID NO: 3665 - RNA, 19 nt, Artificial Sequence
  Description of Artificial Sequence: Synthetic oligonucleotide
cccauaggucaguugcaag

SEQ ID NO: 3666 - RNA, 19 nt, Artificial Sequence
  Description of Artificial Sequence: Synthetic oligonucleotide
ucccauaggucaguugcaa

SEQ ID NO: 3667 - RNA, 19 nt, Artificial Sequence
  Description of Artificial Sequence: Synthetic oligonucleotide
gucccauaggucaguugca

SEQ ID NO: 3668 - RNA, 19 nt, Artificial Sequence
  Description of Artificial Sequence: Synthetic oligonucleotide
ggucccauaggucaguugc

SEQ ID NO: 3669 - RNA, 19 nt, Artificial Sequence
  Description of Artificial Sequence: Synthetic oligonucleotide
aggucccauaggucaguug

SEQ ID NO: 3670 - RNA, 19 nt, Artificial Sequence
  Description of Artificial Sequence: Synthetic oligonucleotide
caggucccauaggucaguu

SEQ ID NO: 3671 - RNA, 19 nt, Artificial Sequence
  Description of Artificial Sequence: Synthetic oligonucleotide
ucaggucccauaggucagu

SEQ ID NO: 3672 - RNA, 19 nt, Artificial Sequence
  Description of Artificial Sequence: Synthetic oligonucleotide
cucaggucccauaggucag

SEQ ID NO: 3673 - RNA, 19 nt, Artificial Sequence
  Description of Artificial Sequence: Synthetic oligonucleotide
ccucaggucccauagguca

SEQ ID NO: 3674 - RNA, 19 nt, Artificial Sequence
  Description of Artificial Sequence: Synthetic oligonucleotide
gccucaggucccauagguc

SEQ ID NO: 3675 - RNA, 19 nt, Artificial Sequence
  Description of Artificial Sequence: Synthetic oligonucleotide
ggccucaggucccauaggu

SEQ ID NO: 3676 - RNA, 19 nt, Artificial Sequence
  Description of Artificial Sequence: Synthetic oligonucleotide
aggccucaggucccauagg

SEQ ID NO: 3677 - RNA, 19 nt, Artificial Sequence
  Description of Artificial Sequence: Synthetic oligonucleotide
caggccucaggucccauag

SEQ ID NO: 3678 - RNA, 19 nt, Artificial Sequence
  Description of Artificial Sequence: Synthetic oligonucleotide
ccaggccucaggucccaua

SEQ ID NO: 3679 - RNA, 19 nt, Artificial Sequence
  Description of Artificial Sequence: Synthetic oligonucleotide
gccaggccucaggucccau

SEQ ID NO: 3680 - RNA, 19 nt, Artificial Sequence
  Description of Artificial Sequence: Synthetic oligonucleotide
ggccaggccucagguccca

SEQ ID NO: 3681 - RNA, 19 nt, Artificial Sequence
  Description of Artificial Sequence: Synthetic oligonucleotide
gggccaggccucagguccc

SEQ ID NO: 3682 - RNA, 19 nt, Artificial Sequence
  Description of Artificial Sequence: Synthetic oligonucleotide
ggggccaggccucaggucc

SEQ ID NO: 3683 - RNA, 19 nt, Artificial Sequence
  Description of Artificial Sequence: Synthetic oligonucleotide
aggggccaggccucagguc

SEQ ID NO: 3684 - RNA, 19 nt, Artificial Sequence
  Description of Artificial Sequence: Synthetic oligonucleotide
gaggggccaggccucaggu

SEQ ID NO: 3685 - RNA, 19 nt, Artificial Sequence
  Description of Artificial Sequence: Synthetic oligonucleotide
ugaggggccaggccucagg

SEQ ID NO: 3686 - RNA, 19 nt, Artificial Sequence
  Description of Artificial Sequence: Synthetic oligonucleotide
augaggggccaggccucag

SEQ ID NO: 3687 - RNA, 19 nt, Artificial Sequence
  Description of Artificial Sequence: Synthetic oligonucleotide
caugaggggccaggccuca

SEQ ID NO: 3688 - RNA, 19 nt, Artificial Sequence
  Description of Artificial Sequence: Synthetic oligonucleotide
ccaugaggggccaggccuc

SEQ ID NO: 3689 - RNA, 19 nt, Artificial Sequence
  Description of Artificial Sequence: Synthetic oligonucleotide
gccaugaggggccaggccu

SEQ ID NO: 3690 - RNA, 19 nt, Artificial Sequence
  Description of Artificial Sequence: Synthetic oligonucleotide
agccaugaggggccaggcc

SEQ ID NO: 3691 - RNA, 19 nt, Artificial Sequence
  Description of Artificial Sequence: Synthetic oligonucleotide
gagccaugaggggccaggc

SEQ ID NO: 3692 - RNA, 19 nt, Artificial Sequence
  Description of Artificial Sequence: Synthetic oligonucleotide
ggagccaugaggggccagg

SEQ ID NO: 3693 - RNA, 19 nt, Artificial Sequence
  Description of Artificial Sequence: Synthetic oligonucleotide
aggagccaugaggggccag

SEQ ID NO: 3694 - RNA, 19 nt, Artificial Sequence
  Description of Artificial Sequence: Synthetic oligonucleotide
caggagccaugaggggcca

SEQ ID NO: 3695 - RNA, 19 nt, Artificial Sequence
  Description of Artificial Sequence: Synthetic oligonucleotide
acaggagccaugaggggcc

SEQ ID NO: 3696 - RNA, 19 nt, Artificial Sequence
  Description of Artificial Sequence: Synthetic oligonucleotide
gacaggagccaugaggggc

SEQ ID NO: 3697 - RNA, 19 nt, Artificial Sequence
  Description of Artificial Sequence: Synthetic oligonucleotide
ugacaggagccaugagggg

SEQ ID NO: 3698 - RNA, 19 nt, Artificial Sequence
  Description of Artificial Sequence: Synthetic oligonucleotide
gugacaggagccaugaggg

SEQ ID NO: 3699 - RNA, 19 nt, Artificial Sequence
  Description of Artificial Sequence: Synthetic oligonucleotide
ggugacaggagccaugagg

SEQ ID NO: 3700 - RNA, 19 nt, Artificial Sequence
  Description of Artificial Sequence: Synthetic oligonucleotide
uggugacaggagccaugag

SEQ ID NO: 3701 - RNA, 19 nt, Artificial Sequence
  Description of Artificial Sequence: Synthetic oligonucleotide
cuggugacaggagccauga

SEQ ID NO: 3702 - RNA, 19 nt, Artificial Sequence
  Description of Artificial Sequence: Synthetic oligonucleotide
ccuggugacaggagccaug

SEQ ID NO: 3703 - RNA, 19 nt, Artificial Sequence
  Description of Artificial Sequence: Synthetic oligonucleotide
accuggugacaggagccau

SEQ ID NO: 3704 - RNA, 19 nt, Artificial Sequence
  Description of Artificial Sequence: Synthetic oligonucleotide
gaccuggugacaggagcca

SEQ ID NO: 3705 - RNA, 19 nt, Artificial Sequence
  Description of Artificial Sequence: Synthetic oligonucleotide
agaccuggugacaggagcc

SEQ ID NO: 3706 - RNA, 19 nt, Artificial Sequence
  Description of Artificial Sequence: Synthetic oligonucleotide
gagaccuggugacaggagc

SEQ ID NO: 3707 - RNA, 19 nt, Artificial Sequence
  Description of Artificial Sequence: Synthetic oligonucleotide
ugagaccuggugacaggag

SEQ ID NO: 3708 - RNA, 19 nt, Artificial Sequence
  Description of Artificial Sequence: Synthetic oligonucleotide
cugagaccuggugacagga

SEQ ID NO: 3709 - RNA, 19 nt, Artificial Sequence
  Description of Artificial Sequence: Synthetic oligonucleotide
ccugagaccuggugacagg

SEQ ID NO: 3710 - RNA, 19 nt, Artificial Sequence
  Description of Artificial Sequence: Synthetic oligonucleotide
accugagaccuggugacag

SEQ ID NO: 3711 - RNA, 19 nt, Artificial Sequence
  Description of Artificial Sequence: Synthetic oligonucleotide
gaccugagaccuggugaca

SEQ ID NO: 3712 - RNA, 19 nt, Artificial Sequence
  Description of Artificial Sequence: Synthetic oligonucleotide
ugaccugagaccuggugac

SEQ ID NO: 3713 - RNA, 19 nt, Artificial Sequence
  Description of Artificial Sequence: Synthetic oligonucleotide
cugaccugagaccugguga

SEQ ID NO: 3714 - RNA, 19 nt, Artificial Sequence
  Description of Artificial Sequence: Synthetic oligonucleotide
ccugaccugagaccuggug

SEQ ID NO: 3715 - RNA, 19 nt, Artificial Sequence
  Description of Artificial Sequence: Synthetic oligonucleotide
cccugaccugagaccuggu

SEQ ID NO: 3716 - RNA, 19 nt, Artificial Sequence
  Description of Artificial Sequence: Synthetic oligonucleotide
acccugaccugagaccugg

SEQ ID NO: 3717 - RNA, 19 nt, Artificial Sequence
  Description of Artificial Sequence: Synthetic oligonucleotide
gacccugaccugagaccug

SEQ ID NO: 3718 - RNA, 19 nt, Artificial Sequence
  Description of Artificial Sequence: Synthetic oligonucleotide
ggacccugaccugagaccu

SEQ ID NO: 3719 - RNA, 19 nt, Artificial Sequence
  Description of Artificial Sequence: Synthetic oligonucleotide
uggacccugaccugagacc

SEQ ID NO: 3720 - RNA, 19 nt, Artificial Sequence
  Description of Artificial Sequence: Synthetic oligonucleotide
cuggacccugaccugagac

SEQ ID NO: 3721 - RNA, 19 nt, Artificial Sequence
  Description of Artificial Sequence: Synthetic oligonucleotide
gcuggacccugaccugaga

SEQ ID NO: 3722 - RNA, 19 nt, Artificial Sequence
  Description of Artificial Sequence: Synthetic oligonucleotide
ugcuggacccugaccugag

SEQ ID NO: 3723 - RNA, 19 nt, Artificial Sequence
  Description of Artificial Sequence: Synthetic oligonucleotide
cugcuggacccugaccuga

SEQ ID NO: 3724 - RNA, 19 nt, Artificial Sequence
  Description of Artificial Sequence: Synthetic oligonucleotide
ccugcuggacccugaccug

SEQ ID NO: 3725 - RNA, 19 nt, Artificial Sequence
  Description of Artificial Sequence: Synthetic oligonucleotide
gccugcuggacccugaccu

SEQ ID NO: 3726 - RNA, 19 nt, Artificial Sequence
  Description of Artificial Sequence: Synthetic oligonucleotide
ggccugcuggacccugacc

SEQ ID NO: 3727 - RNA, 19 nt, Artificial Sequence
  Description of Artificial Sequence: Synthetic oligonucleotide
gggccugcuggacccugac

SEQ ID NO: 3728 - RNA, 19 nt, Artificial Sequence
  Description of Artificial Sequence: Synthetic oligonucleotide
agggccugcuggacccuga

SEQ ID NO: 3729 - RNA, 19 nt, Artificial Sequence
  Description of Artificial Sequence: Synthetic oligonucleotide
cagggccugcuggacccug

SEQ ID NO: 3730 - RNA, 19 nt, Artificial Sequence
  Description of Artificial Sequence: Synthetic oligonucleotide
ucagggccugcuggacccu

SEQ ID NO: 3731 - RNA, 19 nt, Artificial Sequence
  Description of Artificial Sequence: Synthetic oligonucleotide
cucagggccugcuggaccc

SEQ ID NO: 3732 - RNA, 19 nt, Artificial Sequence
  Description of Artificial Sequence: Synthetic oligonucleotide
gcucagggccugcuggacc

SEQ ID NO: 3733 - RNA, 19 nt, Artificial Sequence
  Description of Artificial Sequence: Synthetic oligonucleotide
agcucagggccugcuggac

SEQ ID NO: 3734 - RNA, 19 nt, Artificial Sequence
  Description of Artificial Sequence: Synthetic oligonucleotide
cagcucagggccugcugga

SEQ ID NO: 3735 - RNA, 19 nt, Artificial Sequence
  Description of Artificial Sequence: Synthetic oligonucleotide
ucagcucagggccugcugg

SEQ ID NO: 3736 - RNA, 19 nt, Artificial Sequence
  Description of Artificial Sequence: Synthetic oligonucleotide
gucagcucagggccugcug

SEQ ID NO: 3737 - RNA, 19 nt, Artificial Sequence
  Description of Artificial Sequence: Synthetic oligonucleotide
cgucagcucagggccugcu

SEQ ID NO: 3738 - RNA, 19 nt, Artificial Sequence
  Description of Artificial Sequence: Synthetic oligonucleotide
acgucagcucagggccugc

SEQ ID NO: 3739 - RNA, 19 nt, Artificial Sequence
  Description of Artificial Sequence: Synthetic oligonucleotide
cacgucagcucagggccug

SEQ ID NO: 3740 - RNA, 19 nt, Artificial Sequence
  Description of Artificial Sequence: Synthetic oligonucleotide
acacgucagcucagggccu

SEQ ID NO: 3741 - RNA, 19 nt, Artificial Sequence
  Description of Artificial Sequence: Synthetic oligonucleotide
cacacgucagcucagggcc

SEQ ID NO: 3742 - RNA, 19 nt, Artificial Sequence
  Description of Artificial Sequence: Synthetic oligonucleotide
ccacacgucagcucagggc

SEQ ID NO: 3743 - RNA, 19 nt, Artificial Sequence
  Description of Artificial Sequence: Synthetic oligonucleotide
uccacacgucagcucaggg

SEQ ID NO: 3744 - RNA, 19 nt, Artificial Sequence
  Description of Artificial Sequence: Synthetic oligonucleotide
cuccacacgucagcucagg

SEQ ID NO: 3745 - RNA, 19 nt, Artificial Sequence
  Description of Artificial Sequence: Synthetic oligonucleotide
gcuccacacgucagcucag

SEQ ID NO: 3746 - RNA, 19 nt, Artificial Sequence
  Description of Artificial Sequence: Synthetic oligonucleotide
ggcuccacacgucagcuca

SEQ ID NO: 3747 - RNA, 19 nt, Artificial Sequence
  Description of Artificial Sequence: Synthetic oligonucleotide
uggcuccacacgucagcuc

SEQ ID NO: 3748 - RNA, 19 nt, Artificial Sequence
  Description of Artificial Sequence: Synthetic oligonucleotide
cuggcuccacacgucagcu

SEQ ID NO: 3749 - RNA, 19 nt, Artificial Sequence
  Description of Artificial Sequence: Synthetic oligonucleotide
ucuggcuccacacgucagc

SEQ ID NO: 3750 - RNA, 19 nt, Artificial Sequence
  Description of Artificial Sequence: Synthetic oligonucleotide
cucuggcuccacacgucag

SEQ ID NO: 3751 - RNA, 19 nt, Artificial Sequence
  Description of Artificial Sequence: Synthetic oligonucleotide
gcucuggcuccacacguca

SEQ ID NO: 3752 - RNA, 19 nt, Artificial Sequence
  Description of Artificial Sequence: Synthetic oligonucleotide
ggcucuggcuccacacguc

SEQ ID NO: 3753 - RNA, 19 nt, Artificial Sequence
  Description of Artificial Sequence: Synthetic oligonucleotide
uggcucuggcuccacacgu

SEQ ID NO: 3754 - RNA, 19 nt, Artificial Sequence
  Description of Artificial Sequence: Synthetic oligonucleotide
guggcucuggcuccacacg

SEQ ID NO: 3755 - RNA, 19 nt, Artificial Sequence
  Description of Artificial Sequence: Synthetic oligonucleotide
gguggcucuggcuccacac

SEQ ID NO: 3756 - RNA, 19 nt, Artificial Sequence
  Description of Artificial Sequence: Synthetic oligonucleotide
ggguggcucuggcuccaca

SEQ ID NO: 3757 - RNA, 19 nt, Artificial Sequence
  Description of Artificial Sequence: Synthetic oligonucleotide
uggguggcucuggcuccac

SEQ ID NO: 3758 - RNA, 19 nt, Artificial Sequence
  Description of Artificial Sequence: Synthetic oligonucleotide
uuggguggcucuggcucca

SEQ ID NO: 3759 - RNA, 19 nt, Artificial Sequence
  Description of Artificial Sequence: Synthetic oligonucleotide
auuggguggcucuggcucc

SEQ ID NO: 3760 - RNA, 19 nt, Artificial Sequence
  Description of Artificial Sequence: Synthetic oligonucleotide
gauuggguggcucuggcuc

SEQ ID NO: 3761 - RNA, 19 nt, Artificial Sequence
  Description of Artificial Sequence: Synthetic oligonucleotide
ggauuggguggcucuggcu

SEQ ID NO: 3762 - RNA, 19 nt, Artificial Sequence
  Description of Artificial Sequence: Synthetic oligonucleotide
gggauuggguggcucuggc

SEQ ID NO: 3763 - RNA, 19 nt, Artificial Sequence
  Description of Artificial Sequence: Synthetic oligonucleotide
cgggauuggguggcucugg

SEQ ID NO: 3764 - RNA, 19 nt, Artificial Sequence
  Description of Artificial Sequence: Synthetic oligonucleotide
acgggauuggguggcucug

SEQ ID NO: 3765 - RNA, 19 nt, Artificial Sequence
  Description of Artificial Sequence: Synthetic oligonucleotide
uacgggauuggguggcucu

SEQ ID NO: 3766 - RNA, 19 nt, Artificial Sequence
  Description of Artificial Sequence: Synthetic oligonucleotide
cuacgggauuggguggcuc

SEQ ID NO: 3767 - RNA, 19 nt, Artificial Sequence
  Description of Artificial Sequence: Synthetic oligonucleotide
ccuacgggauuggguggcu

SEQ ID NO: 3768 - RNA, 19 nt, Artificial Sequence
  Description of Artificial Sequence: Synthetic oligonucleotide
cccuacgggauuggguggc

SEQ ID NO: 3769 - RNA, 19 nt, Artificial Sequence
  Description of Artificial Sequence: Synthetic oligonucleotide
ucccuacgggauugggugg

SEQ ID NO: 3770 - RNA, 19 nt, Artificial Sequence
  Description of Artificial Sequence: Synthetic oligonucleotide
gucccuacgggauugggug

SEQ ID NO: 3771 - RNA, 19 nt, Artificial Sequence
  Description of Artificial Sequence: Synthetic oligonucleotide
ugucccuacgggauugggu

SEQ ID NO: 3772 - RNA, 19 nt, Artificial Sequence
  Description of Artificial Sequence: Synthetic oligonucleotide
cugucccuacgggauuggg

SEQ ID NO: 3773 - RNA, 19 nt, Artificial Sequence
  Description of Artificial Sequence: Synthetic oligonucleotide
ccugucccuacgggauugg

SEQ ID NO: 3774 - RNA, 19 nt, Artificial Sequence
  Description of Artificial Sequence: Synthetic oligonucleotide
accugucccuacgggauug

SEQ ID NO: 3775 - RNA, 19 nt, Artificial Sequence
  Description of Artificial Sequence: Synthetic oligonucleotide
aaccugucccuacgggauu

SEQ ID NO: 3776 - RNA, 19 nt, Artificial Sequence
  Description of Artificial Sequence: Synthetic oligonucleotide
aaaccugucccuacgggau

SEQ ID NO: 3777 - RNA, 19 nt, Artificial Sequence
  Description of Artificial Sequence: Synthetic oligonucleotide
gaaaccugucccuacggga

SEQ ID NO: 3778 - RNA, 19 nt, Artificial Sequence
  Description of Artificial Sequence: Synthetic oligonucleotide
ugaaaccugucccuacggg

SEQ ID NO: 3779 - RNA, 19 nt, Artificial Sequence
  Description of Artificial Sequence: Synthetic oligonucleotide
gugaaaccugucccuacgg

SEQ ID NO: 3780 - RNA, 19 nt, Artificial Sequence
  Description of Artificial Sequence: Synthetic oligonucleotide
ugugaaaccugucccuacg

SEQ ID NO: 3781 - RNA, 19 nt, Artificial Sequence
  Description of Artificial Sequence: Synthetic oligonucleotide
uugugaaaccugucccuac

SEQ ID NO: 3782 - RNA, 19 nt, Artificial Sequence
  Description of Artificial Sequence: Synthetic oligonucleotide
guugugaaaccugucccua

SEQ ID NO: 3783 - RNA, 19 nt, Artificial Sequence
  Description of Artificial Sequence: Synthetic oligonucleotide
aguugugaaaccugucccu

SEQ ID NO: 3784 - RNA, 19 nt, Artificial Sequence
  Description of Artificial Sequence: Synthetic oligonucleotide
aaguugugaaaccuguccc

SEQ ID NO: 3785 - RNA, 19 nt, Artificial Sequence
  Description of Artificial Sequence: Synthetic oligonucleotide
gaaguugugaaaccugucc

SEQ ID NO: 3786 - RNA, 19 nt, Artificial Sequence
  Description of Artificial Sequence: Synthetic oligonucleotide
ggaaguugugaaaccuguc

SEQ ID NO: 3787 - RNA, 19 nt, Artificial Sequence
  Description of Artificial Sequence: Synthetic oligonucleotide
gggaaguugugaaaccugu

SEQ ID NO: 3788 - RNA, 19 nt, Artificial Sequence
  Description of Artificial Sequence: Synthetic oligonucleotide
cgggaaguugugaaaccug

SEQ ID NO: 3789 - RNA, 19 nt, Artificial Sequence
  Description of Artificial Sequence: Synthetic oligonucleotide
ccgggaaguugugaaaccu

SEQ ID NO: 3790 - RNA, 19 nt, Artificial Sequence
  Description of Artificial Sequence: Synthetic oligonucleotide
uccgggaaguugugaaacc

SEQ ID NO: 3791 - RNA, 19 nt, Artificial Sequence
  Description of Artificial Sequence: Synthetic oligonucleotide
auccgggaaguugugaaac

SEQ ID NO: 3792 - RNA, 19 nt, Artificial Sequence
  Description of Artificial Sequence: Synthetic oligonucleotide
cauccgggaaguugugaaa

SEQ ID NO: 3793 - RNA, 19 nt, Artificial Sequence
  Description of Artificial Sequence: Synthetic oligonucleotide
ccauccgggaaguugugaa

SEQ ID NO: 3794 - RNA, 19 nt, Artificial Sequence
  Description of Artificial Sequence: Synthetic oligonucleotide
cccauccgggaaguuguga

SEQ ID NO: 3795 - RNA, 19 nt, Artificial Sequence
  Description of Artificial Sequence: Synthetic oligonucleotide
ccccauccgggaaguugug

SEQ ID NO: 3796 - RNA, 19 nt, Artificial Sequence
  Description of Artificial Sequence: Synthetic oligonucleotide
gccccauccgggaaguugu

SEQ ID NO: 3797 - RNA, 19 nt, Artificial Sequence
  Description of Artificial Sequence: Synthetic oligonucleotide
agccccauccgggaaguug

SEQ ID NO: 3798 - RNA, 19 nt, Artificial Sequence
  Description of Artificial Sequence: Synthetic oligonucleotide
cagccccauccgggaaguu

SEQ ID NO: 3799 - RNA, 19 nt, Artificial Sequence
  Description of Artificial Sequence: Synthetic oligonucleotide
acagccccauccgggaagu

SEQ ID NO: 3800 - RNA, 19 nt, Artificial Sequence
  Description of Artificial Sequence: Synthetic oligonucleotide
cacagccccauccgggaag

SEQ ID NO: 3801 - RNA, 19 nt, Artificial Sequence
  Description of Artificial Sequence: Synthetic oligonucleotide
ccacagccccauccgggaa

SEQ ID NO: 3802 - RNA, 19 nt, Artificial Sequence
  Description of Artificial Sequence: Synthetic oligonucleotide
accacagccccauccggga

SEQ ID NO: 3803 - RNA, 19 nt, Artificial Sequence
  Description of Artificial Sequence: Synthetic oligonucleotide
caccacagccccauccggg

SEQ ID NO: 3804 - RNA, 19 nt, Artificial Sequence
  Description of Artificial Sequence: Synthetic oligonucleotide
ccaccacagccccauccgg

SEQ ID NO: 3805 - RNA, 19 nt, Artificial Sequence
  Description of Artificial Sequence: Synthetic oligonucleotide
cccaccacagccccauccg

SEQ ID NO: 3806 - RNA, 19 nt, Artificial Sequence
  Description of Artificial Sequence: Synthetic oligonucleotide
acccaccacagccccaucc

SEQ ID NO: 3807 - RNA, 19 nt, Artificial Sequence
  Description of Artificial Sequence: Synthetic oligonucleotide
gacccaccacagccccauc

SEQ ID NO: 3808 - RNA, 19 nt, Artificial Sequence
  Description of Artificial Sequence: Synthetic oligonucleotide
ugacccaccacagccccau

SEQ ID NO: 3809 - RNA, 19 nt, Artificial Sequence
  Description of Artificial Sequence: Synthetic oligonucleotide
gugacccaccacagcccca

SEQ ID NO: 3810 - RNA, 19 nt, Artificial Sequence
  Description of Artificial Sequence: Synthetic oligonucleotide
ugugacccaccacagcccc

SEQ ID NO: 3811 - RNA, 19 nt, Artificial Sequence
  Description of Artificial Sequence: Synthetic oligonucleotide
cugugacccaccacagccc

SEQ ID NO: 3812 - RNA, 19 nt, Artificial Sequence
  Description of Artificial Sequence: Synthetic oligonucleotide
acugugacccaccacagcc

SEQ ID NO: 3813 - RNA, 19 nt, Artificial Sequence
  Description of Artificial Sequence: Synthetic oligonucleotide
cacugugacccaccacagc

SEQ ID NO: 3814 - RNA, 19 nt, Artificial Sequence
  Description of Artificial Sequence: Synthetic oligonucleotide
gcacugugacccaccacag

SEQ ID NO: 3815 - RNA, 19 nt, Artificial Sequence
  Description of Artificial Sequence: Synthetic oligonucleotide
ugcacugugacccaccaca

SEQ ID NO: 3816 - RNA, 19 nt, Artificial Sequence
  Description of Artificial Sequence: Synthetic oligonucleotide
cugcacugugacccaccac

SEQ ID NO: 3817 - RNA, 19 nt, Artificial Sequence
  Description of Artificial Sequence: Synthetic oligonucleotide
gcugcacugugacccacca

SEQ ID NO: 3818 - RNA, 19 nt, Artificial Sequence
  Description of Artificial Sequence: Synthetic oligonucleotide
ggcugcacugugacccacc

SEQ ID NO: 3819 - RNA, 19 nt, Artificial Sequence
  Description of Artificial Sequence: Synthetic oligonucleotide
aggcugcacugugacccac

SEQ ID NO: 3820 - RNA, 19 nt, Artificial Sequence
  Description of Artificial Sequence: Synthetic oligonucleotide
gaggcugcacugugaccca

SEQ ID NO: 3821 - RNA, 19 nt, Artificial Sequence
  Description of Artificial Sequence: Synthetic oligonucleotide
ggaggcugcacugugaccc

SEQ ID NO: 3822 - RNA, 19 nt, Artificial Sequence
  Description of Artificial Sequence: Synthetic oligonucleotide
uggaggcugcacugugacc

SEQ ID NO: 3823 - RNA, 19 nt, Artificial Sequence
  Description of Artificial Sequence: Synthetic oligonucleotide
cuggaggcugcacugugac

SEQ ID NO: 3824 - RNA, 19 nt, Artificial Sequence
  Description of Artificial Sequence: Synthetic oligonucleotide
gcuggaggcugcacuguga

SEQ ID NO: 3825 - RNA, 19 nt, Artificial Sequence
  Description of Artificial Sequence: Synthetic oligonucleotide
ggcuggaggcugcacugug

SEQ ID NO: 3826 - RNA, 19 nt, Artificial Sequence
  Description of Artificial Sequence: Synthetic oligonucleotide
uggcuggaggcugcacugu

SEQ ID NO: 3827 - RNA, 19 nt, Artificial Sequence
  Description of Artificial Sequence: Synthetic oligonucleotide
cuggcuggaggcugcacug

SEQ ID NO: 3828 - RNA, 19 nt, Artificial Sequence
  Description of Artificial Sequence: Synthetic oligonucleotide
ucuggcuggaggcugcacu

SEQ ID NO: 3829 - RNA, 19 nt, Artificial Sequence
  Description of Artificial Sequence: Synthetic oligonucleotide
uucuggcuggaggcugcac

SEQ ID NO: 3830 - RNA, 19 nt, Artificial Sequence
  Description of Artificial Sequence: Synthetic oligonucleotide
cuucuggcuggaggcugca

SEQ ID NO: 3831 - RNA, 19 nt, Artificial Sequence
  Description of Artificial Sequence: Synthetic oligonucleotide
ccuucuggcuggaggcugc

SEQ ID NO: 3832 - RNA, 19 nt, Artificial Sequence
  Description of Artificial Sequence: Synthetic oligonucleotide
uccuucuggcuggaggcug

SEQ ID NO: 3833 - RNA, 19 nt, Artificial Sequence
  Description of Artificial Sequence: Synthetic oligonucleotide
auccuucuggcuggaggcu

SEQ ID NO: 3834 - RNA, 19 nt, Artificial Sequence
  Description of Artificial Sequence: Synthetic oligonucleotide
cauccuucuggcuggaggc

SEQ ID NO: 3835 - RNA, 19 nt, Artificial Sequence
  Description of Artificial Sequence: Synthetic oligonucleotide
ccauccuucuggcuggagg

SEQ ID NO: 3836 - RNA, 19 nt, Artificial Sequence
  Description of Artificial Sequence: Synthetic oligonucleotide
cccauccuucuggcuggag

SEQ ID NO: 3837 - RNA, 19 nt, Artificial Sequence
  Description of Artificial Sequence: Synthetic oligonucleotide
ccccauccuucuggcugga

SEQ ID NO: 3838 - RNA, 19 nt, Artificial Sequence
  Description of Artificial Sequence: Synthetic oligonucleotide
accccauccuucuggcugg

SEQ ID NO: 3839 - RNA, 19 nt, Artificial Sequence
  Description of Artificial Sequence: Synthetic oligonucleotide
caccccauccuucuggcug

SEQ ID NO: 3840 - RNA, 19 nt, Artificial Sequence
  Description of Artificial Sequence: Synthetic oligonucleotide
ccaccccauccuucuggcu

SEQ ID NO: 3841 - RNA, 19 nt, Artificial Sequence
  Description of Artificial Sequence: Synthetic oligonucleotide
gccaccccauccuucuggc

SEQ ID NO: 3842 - RNA, 19 nt, Artificial Sequence
  Description of Artificial Sequence: Synthetic oligonucleotide
agccaccccauccuucugg

SEQ ID NO: 3843 - RNA, 19 nt, Artificial Sequence
  Description of Artificial Sequence: Synthetic oligonucleotide
gagccaccccauccuucug

SEQ ID NO: 3844 - RNA, 19 nt, Artificial Sequence
  Description of Artificial Sequence: Synthetic oligonucleotide
ggagccaccccauccuucu

SEQ ID NO: 3845 - RNA, 19 nt, Artificial Sequence
  Description of Artificial Sequence: Synthetic oligonucleotide
gggagccaccccauccuuc

SEQ ID NO: 3846 - RNA, 19 nt, Artificial Sequence
  Description of Artificial Sequence: Synthetic oligonucleotide
ugggagccaccccauccuu

SEQ ID NO: 3847 - RNA, 19 nt, Artificial Sequence
  Description of Artificial Sequence: Synthetic oligonucleotide
gugggagccaccccauccu

SEQ ID NO: 3848 - RNA, 19 nt, Artificial Sequence
  Description of Artificial Sequence: Synthetic oligonucleotide
agugggagccaccccaucc

SEQ ID NO: 3849 - RNA, 19 nt, Artificial Sequence
  Description of Artificial Sequence: Synthetic oligonucleotide
gagugggagccaccccauc

SEQ ID NO: 3850 - RNA, 19 nt, Artificial Sequence
  Description of Artificial Sequence: Synthetic oligonucleotide
ggagugggagccaccccau

SEQ ID NO: 3851 - RNA, 19 nt, Artificial Sequence
  Description of Artificial Sequence: Synthetic oligonucleotide
aggagugggagccacccca

SEQ ID NO: 3852 - RNA, 19 nt, Artificial Sequence
  Description of Artificial Sequence: Synthetic oligonucleotide
caggagugggagccacccc

SEQ ID NO: 3853 - RNA, 19 nt, Artificial Sequence
  Description of Artificial Sequence: Synthetic oligonucleotide
gcaggagugggagccaccc

SEQ ID NO: 3854 - RNA, 19 nt, Artificial Sequence
  Description of Artificial Sequence: Synthetic oligonucleotide
agcaggagugggagccacc

SEQ ID NO: 3855 - RNA, 19 nt, Artificial Sequence
  Description of Artificial Sequence: Synthetic oligonucleotide
cagcaggagugggagccac

SEQ ID NO: 3856 - RNA, 19 nt, Artificial Sequence
  Description of Artificial Sequence: Synthetic oligonucleotide
gcagcaggagugggagcca

SEQ ID NO: 3857 - RNA, 19 nt, Artificial Sequence
  Description of Artificial Sequence: Synthetic oligonucleotide
agcagcaggagugggagcc

SEQ ID NO: 3858 - RNA, 19 nt, Artificial Sequence
  Description of Artificial Sequence: Synthetic oligonucleotide
aagcagcaggagugggagc

SEQ ID NO: 3859 - RNA, 19 nt, Artificial Sequence
  Description of Artificial Sequence: Synthetic oligonucleotide
gaagcagcaggagugggag

SEQ ID NO: 3860 - RNA, 19 nt, Artificial Sequence
  Description of Artificial Sequence: Synthetic oligonucleotide
agaagcagcaggaguggga

SEQ ID NO: 3861 - RNA, 19 nt, Artificial Sequence
  Description of Artificial Sequence: Synthetic oligonucleotide
cagaagcagcaggaguggg

SEQ ID NO: 3862 - RNA, 19 nt, Artificial Sequence
  Description of Artificial Sequence: Synthetic oligonucleotide
ucagaagcagcaggagugg

SEQ ID NO: 3863 - RNA, 19 nt, Artificial Sequence
  Description of Artificial Sequence: Synthetic oligonucleotide
gucagaagcagcaggagug

SEQ ID NO: 3864 - RNA, 19 nt, Artificial Sequence
  Description of Artificial Sequence: Synthetic oligonucleotide
agucagaagcagcaggagu

SEQ ID NO: 3865 - RNA, 19 nt, Artificial Sequence
  Description of Artificial Sequence: Synthetic oligonucleotide
gagucagaagcagcaggag

SEQ ID NO: 3866 - RNA, 19 nt, Artificial Sequence
  Description of Artificial Sequence: Synthetic oligonucleotide
ugagucagaagcagcagga

SEQ ID NO: 3867 - RNA, 19 nt, Artificial Sequence
  Description of Artificial Sequence: Synthetic oligonucleotide
uugagucagaagcagcagg

SEQ ID NO: 3868 - RNA, 19 nt, Artificial Sequence
  Description of Artificial Sequence: Synthetic oligonucleotide
auugagucagaagcagcag

SEQ ID NO: 3869 - RNA, 19 nt, Artificial Sequence
  Description of Artificial Sequence: Synthetic oligonucleotide
cauugagucagaagcagca

SEQ ID NO: 3870 - RNA, 19 nt, Artificial Sequence
  Description of Artificial Sequence: Synthetic oligonucleotide
gcauugagucagaagcagc

SEQ ID NO: 3871 - RNA, 19 nt, Artificial Sequence
  Description of Artificial Sequence: Synthetic oligonucleotide
agcauugagucagaagcag

SEQ ID NO: 3872 - RNA, 19 nt, Artificial Sequence
  Description of Artificial Sequence: Synthetic oligonucleotide
aagcauugagucagaagca

SEQ ID NO: 3873 - RNA, 19 nt, Artificial Sequence
  Description of Artificial Sequence: Synthetic oligonucleotide
uaagcauugagucagaagc

SEQ ID NO: 3874 - RNA, 19 nt, Artificial Sequence
  Description of Artificial Sequence: Synthetic oligonucleotide
cuaagcauugagucagaag

SEQ ID NO: 3875 - RNA, 19 nt, Artificial Sequence
  Description of Artificial Sequence: Synthetic oligonucleotide
ccuaagcauugagucagaa

SEQ ID NO: 3876 - RNA, 19 nt, Artificial Sequence
  Description of Artificial Sequence: Synthetic oligonucleotide
cccuaagcauugagucaga

SEQ ID NO: 3877 - RNA, 19 nt, Artificial Sequence
  Description of Artificial Sequence: Synthetic oligonucleotide
ccccuaagcauugagucag

SEQ ID NO: 3878 - RNA, 19 nt, Artificial Sequence
  Description of Artificial Sequence: Synthetic oligonucleotide
accccuaagcauugaguca

SEQ ID NO: 3879 - RNA, 19 nt, Artificial Sequence
  Description of Artificial Sequence: Synthetic oligonucleotide
gaccccuaagcauugaguc

SEQ ID NO: 3880 - RNA, 19 nt, Artificial Sequence
  Description of Artificial Sequence: Synthetic oligonucleotide
ggaccccuaagcauugagu

SEQ ID NO: 3881 - RNA, 19 nt, Artificial Sequence
  Description of Artificial Sequence: Synthetic oligonucleotide
gggaccccuaagcauugag

SEQ ID NO: 3882 - RNA, 19 nt, Artificial Sequence
  Description of Artificial Sequence: Synthetic oligonucleotide
agggaccccuaagcauuga

SEQ ID NO: 3883 - RNA, 19 nt, Artificial Sequence
  Description of Artificial Sequence: Synthetic oligonucleotide
cagggaccccuaagcauug

SEQ ID NO: 3884 - RNA, 19 nt, Artificial Sequence
  Description of Artificial Sequence: Synthetic oligonucleotide
ccagggaccccuaagcauu

SEQ ID NO: 3885 - RNA, 19 nt, Artificial Sequence
  Description of Artificial Sequence: Synthetic oligonucleotide
cccagggaccccuaagcau

SEQ ID NO: 3886 - RNA, 19 nt, Artificial Sequence
  Description of Artificial Sequence: Synthetic oligonucleotide
gcccagggaccccuaagca

SEQ ID NO: 3887 - RNA, 19 nt, Artificial Sequence
  Description of Artificial Sequence: Synthetic oligonucleotide
ugcccagggaccccuaagc

SEQ ID NO: 3888 - RNA, 19 nt, Artificial Sequence
  Description of Artificial Sequence: Synthetic oligonucleotide
cugcccagggaccccuaag

SEQ ID NO: 3889 - RNA, 19 nt, Artificial Sequence
  Description of Artificial Sequence: Synthetic oligonucleotide
gcugcccagggaccccuaa

SEQ ID NO: 3890 - RNA, 19 nt, Artificial Sequence
  Description of Artificial Sequence: Synthetic oligonucleotide
cgcugcccagggaccccua

SEQ ID NO: 3891 - RNA, 19 nt, Artificial Sequence
  Description of Artificial Sequence: Synthetic oligonucleotide
gcgcugcccagggaccccu

SEQ ID NO: 3892 - RNA, 19 nt, Artificial Sequence
  Description of Artificial Sequence: Synthetic oligonucleotide
agcgcugcccagggacccc

SEQ ID NO: 3893 - RNA, 19 nt, Artificial Sequence
  Description of Artificial Sequence: Synthetic oligonucleotide
gagcgcugcccagggaccc

SEQ ID NO: 3894 - RNA, 19 nt, Artificial Sequence
  Description of Artificial Sequence: Synthetic oligonucleotide
cgagcgcugcccagggacc

SEQ ID NO: 3895 - RNA, 19 nt, Artificial Sequence
  Description of Artificial Sequence: Synthetic oligonucleotide
gcgagcgcugcccagggac

SEQ ID NO: 3896 - RNA, 19 nt, Artificial Sequence
  Description of Artificial Sequence: Synthetic oligonucleotide
ggcgagcgcugcccaggga

SEQ ID NO: 3897 - RNA, 19 nt, Artificial Sequence
  Description of Artificial Sequence: Synthetic oligonucleotide
uggcgagcgcugcccaggg

SEQ ID NO: 3898 - RNA, 19 nt, Artificial Sequence
  Description of Artificial Sequence: Synthetic oligonucleotide
auggcgagcgcugcccagg

SEQ ID NO: 3899 - RNA, 19 nt, Artificial Sequence
  Description of Artificial Sequence: Synthetic oligonucleotide
aauggcgagcgcugcccag

SEQ ID NO: 3900 - RNA, 19 nt, Artificial Sequence
  Description of Artificial Sequence: Synthetic oligonucleotide
caauggcgagcgcugccca

SEQ ID NO: 3901 - RNA, 19 nt, Artificial Sequence
  Description of Artificial Sequence: Synthetic oligonucleotide
ucaauggcgagcgcugccc

SEQ ID NO: 3902 - RNA, 19 nt, Artificial Sequence
  Description of Artificial Sequence: Synthetic oligonucleotide
uucaauggcgagcgcugcc

SEQ ID NO: 3903 - RNA, 19 nt, Artificial Sequence
  Description of Artificial Sequence: Synthetic oligonucleotide
auucaauggcgagcgcugc

SEQ ID NO: 3904 - RNA, 19 nt, Artificial Sequence
  Description of Artificial Sequence: Synthetic oligonucleotide
cauucaauggcgagcgcug

SEQ ID NO: 3905 - RNA, 19 nt, Artificial Sequence
  Description of Artificial Sequence: Synthetic oligonucleotide
ucauucaauggcgagcgcu

SEQ ID NO: 3906 - RNA, 19 nt, Artificial Sequence
  Description of Artificial Sequence: Synthetic oligonucleotide
gucauucaauggcgagcgc

SEQ ID NO: 3907 - RNA, 19 nt, Artificial Sequence
  Description of Artificial Sequence: Synthetic oligonucleotide
agucauucaauggcgagcg

SEQ ID NO: 3908 - RNA, 19 nt, Artificial Sequence
  Description of Artificial Sequence: Synthetic oligonucleotide
aagucauucaauggcgagc

SEQ ID NO: 3909 - RNA, 19 nt, Artificial Sequence
  Description of Artificial Sequence: Synthetic oligonucleotide
gaagucauucaauggcgag

SEQ ID NO: 3910 - RNA, 19 nt, Artificial Sequence
  Description of Artificial Sequence: Synthetic oligonucleotide
ggaagucauucaauggcga

SEQ ID NO: 3911 - RNA, 19 nt, Artificial Sequence
  Description of Artificial Sequence: Synthetic oligonucleotide
uggaagucauucaauggcg

SEQ ID NO: 3912 - RNA, 19 nt, Artificial Sequence
  Description of Artificial Sequence: Synthetic oligonucleotide
uuggaagucauucaauggc

SEQ ID NO: 3913 - RNA, 19 nt, Artificial Sequence
  Description of Artificial Sequence: Synthetic oligonucleotide
cuuggaagucauucaaugg

SEQ ID NO: 3914 - RNA, 19 nt, Artificial Sequence
  Description of Artificial Sequence: Synthetic oligonucleotide
acuuggaagucauucaaug

SEQ ID NO: 3915 - RNA, 19 nt, Artificial Sequence
  Description of Artificial Sequence: Synthetic oligonucleotide
cacuuggaagucauucaau

SEQ ID NO: 3916 - RNA, 19 nt, Artificial Sequence
  Description of Artificial Sequence: Synthetic oligonucleotide
gcacuuggaagucauucaa

SEQ ID NO: 3917 - RNA, 19 nt, Artificial Sequence
  Description of Artificial Sequence: Synthetic oligonucleotide
agcacuuggaagucauuca

SEQ ID NO: 3918 - RNA, 19 nt, Artificial Sequence
  Description of Artificial Sequence: Synthetic oligonucleotide
gagcacuuggaagucauuc

SEQ ID NO: 3919 - RNA, 19 nt, Artificial Sequence
  Description of Artificial Sequence: Synthetic oligonucleotide
ggagcacuuggaagucauu

SEQ ID NO: 3920 - RNA, 19 nt, Artificial Sequence
  Description of Artificial Sequence: Synthetic oligonucleotide
cggagcacuuggaagucau

SEQ ID NO: 3921 - RNA, 19 nt, Artificial Sequence
  Description of Artificial Sequence: Synthetic oligonucleotide
ccggagcacuuggaaguca

SEQ ID NO: 3922 - RNA, 19 nt, Artificial Sequence
  Description of Artificial Sequence: Synthetic oligonucleotide
cccggagcacuuggaaguc

SEQ ID NO: 3923 - RNA, 19 nt, Artificial Sequence
  Description of Artificial Sequence: Synthetic oligonucleotide
ccccggagcacuuggaagu

SEQ ID NO: 3924 - RNA, 19 nt, Artificial Sequence
  Description of Artificial Sequence: Synthetic oligonucleotide
gccccggagcacuuggaag

SEQ ID NO: 3925 - RNA, 19 nt, Artificial Sequence
  Description of Artificial Sequence: Synthetic oligonucleotide
ugccccggagcacuuggaa

SEQ ID NO: 3926 - RNA, 19 nt, Artificial Sequence
  Description of Artificial Sequence: Synthetic oligonucleotide
gugccccggagcacuugga

SEQ ID NO: 3927 - RNA, 19 nt, Artificial Sequence
  Description of Artificial Sequence: Synthetic oligonucleotide
ugugccccggagcacuugg

SEQ ID NO: 3928 - RNA, 19 nt, Artificial Sequence
  Description of Artificial Sequence: Synthetic oligonucleotide
cugugccccggagcacuug

SEQ ID NO: 3929 - RNA, 19 nt, Artificial Sequence
  Description of Artificial Sequence: Synthetic oligonucleotide
ucugugccccggagcacuu

SEQ ID NO: 3930 - RNA, 19 nt, Artificial Sequence
  Description of Artificial Sequence: Synthetic oligonucleotide
cucugugccccggagcacu

SEQ ID NO: 3931 - RNA, 19 nt, Artificial Sequence
  Description of Artificial Sequence: Synthetic oligonucleotide
gcucugugccccggagcac

SEQ ID NO: 3932 - RNA, 19 nt, Artificial Sequence
  Description of Artificial Sequence: Synthetic oligonucleotide
agcucugugccccggagca

SEQ ID NO: 3933 - RNA, 19 nt, Artificial Sequence
  Description of Artificial Sequence: Synthetic oligonucleotide
uagcucugugccccggagc

SEQ ID NO: 3934 - RNA, 19 nt, Artificial Sequence
  Description of Artificial Sequence: Synthetic oligonucleotide
guagcucugugccccggag

SEQ ID NO: 3935 - RNA, 19 nt, Artificial Sequence
  Description of Artificial Sequence: Synthetic oligonucleotide
uguagcucugugccccgga

SEQ ID NO: 3936 - RNA, 19 nt, Artificial Sequence
  Description of Artificial Sequence: Synthetic oligonucleotide
cuguagcucugugccccgg

SEQ ID NO: 3937 - RNA, 19 nt, Artificial Sequence
  Description of Artificial Sequence: Synthetic oligonucleotide
gcuguagcucugugccccg

SEQ ID NO: 3938 - RNA, 19 nt, Artificial Sequence
  Description of Artificial Sequence: Synthetic oligonucleotide
ugcuguagcucugugcccc

SEQ ID NO: 3939 - RNA, 19 nt, Artificial Sequence
  Description of Artificial Sequence: Synthetic oligonucleotide
gugcuguagcucugugccc

SEQ ID NO: 3940 - RNA, 19 nt, Artificial Sequence
  Description of Artificial Sequence: Synthetic oligonucleotide
ggugcuguagcucugugcc

SEQ ID NO: 3941 - RNA, 19 nt, Artificial Sequence
  Description of Artificial Sequence: Synthetic oligonucleotide
aggugcuguagcucugugc

SEQ ID NO: 3942 - RNA, 19 nt, Artificial Sequence
  Description of Artificial Sequence: Synthetic oligonucleotide
caggugcuguagcucugug

SEQ ID NO: 3943 - RNA, 19 nt, Artificial Sequence
  Description of Artificial Sequence: Synthetic oligonucleotide
gcaggugcuguagcucugu

SEQ ID NO: 3944 - RNA, 19 nt, Artificial Sequence
  Description of Artificial Sequence: Synthetic oligonucleotide
agcaggugcuguagcucug

SEQ ID NO: 3945 - RNA, 19 nt, Artificial Sequence
  Description of Artificial Sequence: Synthetic oligonucleotide
uagcaggugcuguagcucu

SEQ ID NO: 3946 - RNA, 19 nt, Artificial Sequence
  Description of Artificial Sequence: Synthetic oligonucleotide
guagcaggugcuguagcuc

SEQ ID NO: 3947 - RNA, 19 nt, Artificial Sequence
  Description of Artificial Sequence: Synthetic oligonucleotide
uguagcaggugcuguagcu

SEQ ID NO: 3948 - RNA, 19 nt, Artificial Sequence
  Description of Artificial Sequence: Synthetic oligonucleotide
auguagcaggugcuguagc

SEQ ID NO: 3949 - RNA, 19 nt, Artificial Sequence
  Description of Artificial Sequence: Synthetic oligonucleotide
cauguagcaggugcuguag

SEQ ID NO: 3950 - RNA, 19 nt, Artificial Sequence
  Description of Artificial Sequence: Synthetic oligonucleotide
gcauguagcaggugcugua

SEQ ID NO: 3951 - RNA, 19 nt, Artificial Sequence
  Description of Artificial Sequence: Synthetic oligonucleotide
cgcauguagcaggugcugu

SEQ ID NO: 3952 - RNA, 19 nt, Artificial Sequence
  Description of Artificial Sequence: Synthetic oligonucleotide
ccgcauguagcaggugcug

SEQ ID NO: 3953 - RNA, 19 nt, Artificial Sequence
  Description of Artificial Sequence: Synthetic oligonucleotide
accgcauguagcaggugcu

SEQ ID NO: 3954 - RNA, 19 nt, Artificial Sequence
  Description of Artificial Sequence: Synthetic oligonucleotide
caccgcauguagcaggugc

SEQ ID NO: 3955 - RNA, 19 nt, Artificial Sequence
  Description of Artificial Sequence: Synthetic oligonucleotide
ccaccgcauguagcaggug

SEQ ID NO: 3956 - RNA, 19 nt, Artificial Sequence
  Description of Artificial Sequence: Synthetic oligonucleotide
accaccgcauguagcaggu

SEQ ID NO: 3957 - RNA, 19 nt, Artificial Sequence
  Description of Artificial Sequence: Synthetic oligonucleotide
caccaccgcauguagcagg

SEQ ID NO: 3958 - RNA, 19 nt, Artificial Sequence
  Description of Artificial Sequence: Synthetic oligonucleotide
gcaccaccgcauguagcag

SEQ ID NO: 3959 - RNA, 19 nt, Artificial Sequence
  Description of Artificial Sequence: Synthetic oligonucleotide
ggcaccaccgcauguagca

SEQ ID NO: 3960 - RNA, 19 nt, Artificial Sequence
  Description of Artificial Sequence: Synthetic oligonucleotide
gggcaccaccgcauguagc

SEQ ID NO: 3961 - RNA, 19 nt, Artificial Sequence
  Description of Artificial Sequence: Synthetic oligonucleotide
cgggcaccaccgcauguag

SEQ ID NO: 3962 - RNA, 19 nt, Artificial Sequence
  Description of Artificial Sequence: Synthetic oligonucleotide
ccgggcaccaccgcaugua

SEQ ID NO: 3963 - RNA, 19 nt, Artificial Sequence
  Description of Artificial Sequence: Synthetic oligonucleotide
cccgggcaccaccgcaugu

SEQ ID NO: 3964 - RNA, 19 nt, Artificial Sequence
  Description of Artificial Sequence: Synthetic oligonucleotide
gcccgggcaccaccgcaug

SEQ ID NO: 3965 - RNA, 19 nt, Artificial Sequence
  Description of Artificial Sequence: Synthetic oligonucleotide
ggcccgggcaccaccgcau

SEQ ID NO: 3966 - RNA, 19 nt, Artificial Sequence
  Description of Artificial Sequence: Synthetic oligonucleotide
aggcccgggcaccaccgca

SEQ ID NO: 3967 - RNA, 19 nt, Artificial Sequence
  Description of Artificial Sequence: Synthetic oligonucleotide
aaggcccgggcaccaccgc

SEQ ID NO: 3968 - RNA, 19 nt, Artificial Sequence
  Description of Artificial Sequence: Synthetic oligonucleotide
caaggcccgggcaccaccg

SEQ ID NO: 3969 - RNA, 19 nt, Artificial Sequence
  Description of Artificial Sequence: Synthetic oligonucleotide
ccaaggcccgggcaccacc

SEQ ID NO: 3970 - RNA, 19 nt, Artificial Sequence
  Description of Artificial Sequence: Synthetic oligonucleotide
gccaaggcccgggcaccac

SEQ ID NO: 3971 - RNA, 19 nt, Artificial Sequence
  Description of Artificial Sequence: Synthetic oligonucleotide
ugccaaggcccgggcacca

SEQ ID NO: 3972 - RNA, 19 nt, Artificial Sequence
  Description of Artificial Sequence: Synthetic oligonucleotide
cugccaaggcccgggcacc

SEQ ID NO: 3973 - RNA, 19 nt, Artificial Sequence
  Description of Artificial Sequence: Synthetic oligonucleotide
ccugccaaggcccgggcac

SEQ ID NO: 3974 - RNA, 19 nt, Artificial Sequence
  Description of Artificial Sequence: Synthetic oligonucleotide
uccugccaaggcccgggca

SEQ ID NO: 3975 - RNA, 19 nt, Artificial Sequence
  Description of Artificial Sequence: Synthetic oligonucleotide
cuccugccaaggcccgggc

SEQ ID NO: 3976 - RNA, 19 nt, Artificial Sequence
  Description of Artificial Sequence: Synthetic oligonucleotide
ccuccugccaaggcccggg

SEQ ID NO: 3977 - RNA, 19 nt, Artificial Sequence
  Description of Artificial Sequence: Synthetic oligonucleotide
uccuccugccaaggcccgg

SEQ ID NO: 3978 - RNA, 19 nt, Artificial Sequence
  Description of Artificial Sequence: Synthetic oligonucleotide
auccuccugccaaggcccg

SEQ ID NO: 3979 - RNA, 19 nt, Artificial Sequence
  Description of Artificial Sequence: Synthetic oligonucleotide
cauccuccugccaaggccc

SEQ ID NO: 3980 - RNA, 19 nt, Artificial Sequence
  Description of Artificial Sequence: Synthetic oligonucleotide
acauccuccugccaaggcc

SEQ ID NO: 3981 - RNA, 19 nt, Artificial Sequence
  Description of Artificial Sequence: Synthetic oligonucleotide
cacauccuccugccaaggc

SEQ ID NO: 3982 - RNA, 19 nt, Artificial Sequence
  Description of Artificial Sequence: Synthetic oligonucleotide
ccacauccuccugccaagg

SEQ ID NO: 3983 - RNA, 19 nt, Artificial Sequence
  Description of Artificial Sequence: Synthetic oligonucleotide
gccacauccuccugccaag

SEQ ID NO: 3984 - RNA, 19 nt, Artificial Sequence
  Description of Artificial Sequence: Synthetic oligonucleotide
ugccacauccuccugccaa

SEQ ID NO: 3985 - RNA, 19 nt, Artificial Sequence
  Description of Artificial Sequence: Synthetic oligonucleotide
cugccacauccuccugcca

SEQ ID NO: 3986 - RNA, 19 nt, Artificial Sequence
  Description of Artificial Sequence: Synthetic oligonucleotide
ucugccacauccuccugcc

SEQ ID NO: 3987 - RNA, 19 nt, Artificial Sequence
  Description of Artificial Sequence: Synthetic oligonucleotide
aucugccacauccuccugc

SEQ ID NO: 3988 - RNA, 19 nt, Artificial Sequence
  Description of Artificial Sequence: Synthetic oligonucleotide
caucugccacauccuccug

SEQ ID NO: 3989 - RNA, 19 nt, Artificial Sequence
  Description of Artificial Sequence: Synthetic oligonucleotide
gcaucugccacauccuccu

SEQ ID NO: 3990 - RNA, 19 nt, Artificial Sequence
  Description of Artificial Sequence: Synthetic oligonucleotide
agcaucugccacauccucc

SEQ ID NO: 3991 - RNA, 19 nt, Artificial Sequence
  Description of Artificial Sequence: Synthetic oligonucleotide
cagcaucugccacauccuc

SEQ ID NO: 3992 - RNA, 19 nt, Artificial Sequence
  Description of Artificial Sequence: Synthetic oligonucleotide
ucagcaucugccacauccu

SEQ ID NO: 3993 - RNA, 19 nt, Artificial Sequence
  Description of Artificial Sequence: Synthetic oligonucleotide
uucagcaucugccacaucc

SEQ ID NO: 3994 - RNA, 19 nt, Artificial Sequence
  Description of Artificial Sequence: Synthetic oligonucleotide
cuucagcaucugccacauc

SEQ ID NO: 3995 - RNA, 19 nt, Artificial Sequence
  Description of Artificial Sequence: Synthetic oligonucleotide
ucuucagcaucugccacau

SEQ ID NO: 3996 - RNA, 19 nt, Artificial Sequence
  Description of Artificial Sequence: Synthetic oligonucleotide
cucuucagcaucugccaca

SEQ ID NO: 3997 - RNA, 19 nt, Artificial Sequence
  Description of Artificial Sequence: Synthetic oligonucleotide
acucuucagcaucugccac

SEQ ID NO: 3998 - RNA, 19 nt, Artificial Sequence
  Description of Artificial Sequence: Synthetic oligonucleotide
cacucuucagcaucugcca

SEQ ID NO: 3999 - RNA, 19 nt, Artificial Sequence
  Description of Artificial Sequence: Synthetic oligonucleotide
acacucuucagcaucugcc

SEQ ID NO: 4000 - RNA, 19 nt, Artificial Sequence
  Description of Artificial Sequence: Synthetic oligonucleotide
cacacucuucagcaucugc

SEQ ID NO: 4001 - RNA, 19 nt, Artificial Sequence
  Description of Artificial Sequence: Synthetic oligonucleotide
gcacacucuucagcaucug

SEQ ID NO: 4002 - RNA, 19 nt, Artificial Sequence
  Description of Artificial Sequence: Synthetic oligonucleotide
agcacacucuucagcaucu

SEQ ID NO: 4003 - RNA, 19 nt, Artificial Sequence
  Description of Artificial Sequence: Synthetic oligonucleotide
cagcacacucuucagcauc

SEQ ID NO: 4004 - RNA, 19 nt, Artificial Sequence
  Description of Artificial Sequence: Synthetic oligonucleotide
ccagcacacucuucagcau

SEQ ID NO: 4005 - RNA, 19 nt, Artificial Sequence
  Description of Artificial Sequence: Synthetic oligonucleotide
accagcacacucuucagca

SEQ ID NO: 4006 - RNA, 19 nt, Artificial Sequence
  Description of Artificial Sequence: Synthetic oligonucleotide
gaccagcacacucuucagc

SEQ ID NO: 4007 - RNA, 19 nt, Artificial Sequence
  Description of Artificial Sequence: Synthetic oligonucleotide
cgaccagcacacucuucag

SEQ ID NO: 4008 - RNA, 19 nt, Artificial Sequence
  Description of Artificial Sequence: Synthetic oligonucleotide
gcgaccagcacacucuuca

SEQ ID NO: 4009 - RNA, 19 nt, Artificial Sequence
  Description of Artificial Sequence: Synthetic oligonucleotide
agcgaccagcacacucuuc

SEQ ID NO: 4010 - RNA, 19 nt, Artificial Sequence
  Description of Artificial Sequence: Synthetic oligonucleotide
cagcgaccagcacacucuu

SEQ ID NO: 4011 - RNA, 19 nt, Artificial Sequence
  Description of Artificial Sequence: Synthetic oligonucleotide
acagcgaccagcacacucu

SEQ ID NO: 4012 - RNA, 19 nt, Artificial Sequence
  Description of Artificial Sequence: Synthetic oligonucleotide
cacagcgaccagcacacuc

SEQ ID NO: 4013 - RNA, 19 nt, Artificial Sequence
  Description of Artificial Sequence: Synthetic oligonucleotide
ccacagcgaccagcacacu

SEQ ID NO: 4014 - RNA, 19 nt, Artificial Sequence
  Description of Artificial Sequence: Synthetic oligonucleotide
cccacagcgaccagcacac

SEQ ID NO: 4015 - RNA, 19 nt, Artificial Sequence
  Description of Artificial Sequence: Synthetic oligonucleotide
gcccacagcgaccagcaca

SEQ ID NO: 4016 - RNA, 19 nt, Artificial Sequence
  Description of Artificial Sequence: Synthetic oligonucleotide
ggcccacagcgaccagcac

SEQ ID NO: 4017 - RNA, 19 nt, Artificial Sequence
  Description of Artificial Sequence: Synthetic oligonucleotide
gggcccacagcgaccagca

SEQ ID NO: 4018 - RNA, 19 nt, Artificial Sequence
  Description of Artificial Sequence: Synthetic oligonucleotide
agggcccacagcgaccagc

SEQ ID NO: 4019 - RNA, 19 nt, Artificial Sequence
  Description of Artificial Sequence: Synthetic oligonucleotide
aagggcccacagcgaccag

SEQ ID NO: 4020 - RNA, 19 nt, Artificial Sequence
  Description of Artificial Sequence: Synthetic oligonucleotide
uaagggcccacagcgacca

SEQ ID NO: 4021 - RNA, 19 nt, Artificial Sequence
  Description of Artificial Sequence: Synthetic oligonucleotide
uuaagggcccacagcgacc

SEQ ID NO: 4022 - RNA, 19 nt, Artificial Sequence
  Description of Artificial Sequence: Synthetic oligonucleotide
auuaagggcccacagcgac

SEQ ID NO: 4023 - RNA, 19 nt, Artificial Sequence
  Description of Artificial Sequence: Synthetic oligonucleotide
cauuaagggcccacagcga

SEQ ID NO: 4024 - RNA, 19 nt, Artificial Sequence
  Description of Artificial Sequence: Synthetic oligonucleotide
ccauuaagggcccacagcg

SEQ ID NO: 4025 - RNA, 19 nt, Artificial Sequence
  Description of Artificial Sequence: Synthetic oligonucleotide
uccauuaagggcccacagc

SEQ ID NO: 4026 - RNA, 19 nt, Artificial Sequence
  Description of Artificial Sequence: Synthetic oligonucleotide
guccauuaagggcccacag

SEQ ID NO: 4027 - RNA, 19 nt, Artificial Sequence
  Description of Artificial Sequence: Synthetic oligonucleotide
aguccauuaagggcccaca

SEQ ID NO: 4028 - RNA, 19 nt, Artificial Sequence
  Description of Artificial Sequence: Synthetic oligonucleotide
caguccauuaagggcccac

SEQ ID NO: 4029 - RNA, 19 nt, Artificial Sequence
  Description of Artificial Sequence: Synthetic oligonucleotide
gcaguccauuaagggccca

SEQ ID NO: 4030 - RNA, 19 nt, Artificial Sequence
  Description of Artificial Sequence: Synthetic oligonucleotide
ggcaguccauuaagggccc

SEQ ID NO: 4031 - RNA, 19 nt, Artificial Sequence
  Description of Artificial Sequence: Synthetic oligonucleotide
cggcaguccauuaagggcc

SEQ ID NO: 4032 - RNA, 19 nt, Artificial Sequence
  Description of Artificial Sequence: Synthetic oligonucleotide
ccggcaguccauuaagggc

SEQ ID NO: 4033 - RNA, 19 nt, Artificial Sequence
  Description of Artificial Sequence: Synthetic oligonucleotide
cccggcaguccauuaaggg

SEQ ID NO: 4034 - RNA, 19 nt, Artificial Sequence
  Description of Artificial Sequence: Synthetic oligonucleotide
gcccggcaguccauuaagg

SEQ ID NO: 4035 - RNA, 19 nt, Artificial Sequence
  Description of Artificial Sequence: Synthetic oligonucleotide
ggcccggcaguccauuaag

SEQ ID NO: 4036 - RNA, 19 nt, Artificial Sequence
  Description of Artificial Sequence: Synthetic oligonucleotide
aggcccggcaguccauuaa

SEQ ID NO: 4037 - RNA, 19 nt, Artificial Sequence
  Description of Artificial Sequence: Synthetic oligonucleotide
aaggcccggcaguccauua

SEQ ID NO: 4038 - RNA, 19 nt, Artificial Sequence
  Description of Artificial Sequence: Synthetic oligonucleotide
gaaggcccggcaguccauu

SEQ ID NO: 4039 - RNA, 19 nt, Artificial Sequence
  Description of Artificial Sequence: Synthetic oligonucleotide
ggaaggcccggcaguccau

SEQ ID NO: 4040 - RNA, 19 nt, Artificial Sequence
  Description of Artificial Sequence: Synthetic oligonucleotide
uggaaggcccggcagucca

SEQ ID NO: 4041 - RNA, 19 nt, Artificial Sequence
  Description of Artificial Sequence: Synthetic oligonucleotide
guggaaggcccggcagucc

SEQ ID NO: 4042 - RNA, 19 nt, Artificial Sequence
  Description of Artificial Sequence: Synthetic oligonucleotide
aguggaaggcccggcaguc

SEQ ID NO: 4043 - RNA, 19 nt, Artificial Sequence
  Description of Artificial Sequence: Synthetic oligonucleotide
uaguggaaggcccggcagu

SEQ ID NO: 4044 - RNA, 19 nt, Artificial Sequence
  Description of Artificial Sequence: Synthetic oligonucleotide
guaguggaaggcccggcag

SEQ ID NO: 4045 - RNA, 19 nt, Artificial Sequence
  Description of Artificial Sequence: Synthetic oligonucleotide
uguaguggaaggcccggca

SEQ ID NO: 4046 - RNA, 19 nt, Artificial Sequence
  Description of Artificial Sequence: Synthetic oligonucleotide
uuguaguggaaggcccggc

SEQ ID NO: 4047 - RNA, 19 nt, Artificial Sequence
  Description of Artificial Sequence: Synthetic oligonucleotide
guuguaguggaaggcccgg

SEQ ID NO: 4048 - RNA, 19 nt, Artificial Sequence
  Description of Artificial Sequence: Synthetic oligonucleotide
cguuguaguggaaggcccg

SEQ ID NO: 4049 - RNA, 19 nt, Artificial Sequence
  Description of Artificial Sequence: Synthetic oligonucleotide
acguuguaguggaaggccc

SEQ ID NO: 4050 - RNA, 19 nt, Artificial Sequence
  Description of Artificial Sequence: Synthetic oligonucleotide
cacguuguaguggaaggcc

SEQ ID NO: 4051 - RNA, 19 nt, Artificial Sequence
  Description of Artificial Sequence: Synthetic oligonucleotide
ucacguuguaguggaaggc

SEQ ID NO: 4052 - RNA, 19 nt, Artificial Sequence
  Description of Artificial Sequence: Synthetic oligonucleotide
cucacguuguaguggaagg

SEQ ID NO: 4053 - RNA, 19 nt, Artificial Sequence
  Description of Artificial Sequence: Synthetic oligonucleotide
gcucacguuguaguggaag

SEQ ID NO: 4054 - RNA, 19 nt, Artificial Sequence
  Description of Artificial Sequence: Synthetic oligonucleotide
ugcucacguuguaguggaa

SEQ ID NO: 4055 - RNA, 19 nt, Artificial Sequence
  Description of Artificial Sequence: Synthetic oligonucleotide
cugcucacguuguagugga

SEQ ID NO: 4056 - RNA, 19 nt, Artificial Sequence
  Description of Artificial Sequence: Synthetic oligonucleotide
gcugcucacguuguagugg

SEQ ID NO: 4057 - RNA, 19 nt, Artificial Sequence
  Description of Artificial Sequence: Synthetic oligonucleotide
ggcugcucacguuguagug

SEQ ID NO: 4058 - RNA, 19 nt, Artificial Sequence
  Description of Artificial Sequence: Synthetic oligonucleotide
uggcugcucacguuguagu

SEQ ID NO: 4059 - RNA, 19 nt, Artificial Sequence
  Description of Artificial Sequence: Synthetic oligonucleotide
auggcugcucacguuguag

SEQ ID NO: 4060 - RNA, 19 nt, Artificial Sequence
  Description of Artificial Sequence: Synthetic oligonucleotide
cauggcugcucacguugua

SEQ ID NO: 4061 - RNA, 19 nt, Artificial Sequence
  Description of Artificial Sequence: Synthetic oligonucleotide
ccauggcugcucacguugu

SEQ ID NO: 4062 - RNA, 19 nt, Artificial Sequence
  Description of Artificial Sequence: Synthetic oligonucleotide
accauggcugcucacguug

SEQ ID NO: 4063 - RNA, 19 nt, Artificial Sequence
  Description of Artificial Sequence: Synthetic oligonucleotide
aaccauggcugcucacguu

SEQ ID NO: 4064 - RNA, 19 nt, Artificial Sequence
  Description of Artificial Sequence: Synthetic oligonucleotide
caaccauggcugcucacgu

SEQ ID NO: 4065 - RNA, 19 nt, Artificial Sequence
  Description of Artificial Sequence: Synthetic oligonucleotide
gcaaccauggcugcucacg

SEQ ID NO: 4066 - RNA, 19 nt, Artificial Sequence
  Description of Artificial Sequence: Synthetic oligonucleotide
ggcaaccauggcugcucac

SEQ ID NO: 4067 - RNA, 19 nt, Artificial Sequence
  Description of Artificial Sequence: Synthetic oligonucleotide
uggcaaccauggcugcuca

SEQ ID NO: 4068 - RNA, 19 nt, Artificial Sequence
  Description of Artificial Sequence: Synthetic oligonucleotide
uuggcaaccauggcugcuc

SEQ ID NO: 4069 - RNA, 19 nt, Artificial Sequence
  Description of Artificial Sequence: Synthetic oligonucleotide
guuggcaaccauggcugcu

SEQ ID NO: 4070 - RNA, 19 nt, Artificial Sequence
  Description of Artificial Sequence: Synthetic oligonucleotide
aguuggcaaccauggcugc

SEQ ID NO: 4071 - RNA, 19 nt, Artificial Sequence
  Description of Artificial Sequence: Synthetic oligonucleotide
caguuggcaaccauggcug

SEQ ID NO: 4072 - RNA, 19 nt, Artificial Sequence
  Description of Artificial Sequence: Synthetic oligonucleotide
gcaguuggcaaccauggcu

SEQ ID NO: 4073 - RNA, 19 nt, Artificial Sequence
  Description of Artificial Sequence: Synthetic oligonucleotide
agcaguuggcaaccauggc

SEQ ID NO: 4074 - RNA, 19 nt, Artificial Sequence
  Description of Artificial Sequence: Synthetic oligonucleotide
cagcaguuggcaaccaugg

SEQ ID NO: 4075 - RNA, 19 nt, Artificial Sequence
  Description of Artificial Sequence: Synthetic oligonucleotide
gcagcaguuggcaaccaug

SEQ ID NO: 4076 - RNA, 19 nt, Artificial Sequence
  Description of Artificial Sequence: Synthetic oligonucleotide
ggcagcaguuggcaaccau

SEQ ID NO: 4077 - RNA, 19 nt, Artificial Sequence
  Description of Artificial Sequence: Synthetic oligonucleotide
uggcagcaguuggcaacca

SEQ ID NO: 4078 - RNA, 19 nt, Artificial Sequence
  Description of Artificial Sequence: Synthetic oligonucleotide
auggcagcaguuggcaacc

SEQ ID NO: 4079 - RNA, 19 nt, Artificial Sequence
  Description of Artificial Sequence: Synthetic oligonucleotide
cauggcagcaguuggcaac

SEQ ID NO: 4080 - RNA, 19 nt, Artificial Sequence
  Description of Artificial Sequence: Synthetic oligonucleotide
ccauggcagcaguuggcaa

SEQ ID NO: 4081 - RNA, 19 nt, Artificial Sequence
  Description of Artificial Sequence: Synthetic oligonucleotide
uccauggcagcaguuggca

SEQ ID NO: 4082 - RNA, 19 nt, Artificial Sequence
  Description of Artificial Sequence: Synthetic oligonucleotide
guccauggcagcaguuggc

SEQ ID NO: 4083 - RNA, 19 nt, Artificial Sequence
  Description of Artificial Sequence: Synthetic oligonucleotide
aguccauggcagcaguugg

SEQ ID NO: 4084 - RNA, 19 nt, Artificial Sequence
  Description of Artificial Sequence: Synthetic oligonucleotide
gaguccauggcagcaguug

SEQ ID NO: 4085 - RNA, 19 nt, Artificial Sequence
  Description of Artificial Sequence: Synthetic oligonucleotide
ugaguccauggcagcaguu

SEQ ID NO: 4086 - RNA, 19 nt, Artificial Sequence
  Description of Artificial Sequence: Synthetic oligonucleotide
uugaguccauggcagcagu

SEQ ID NO: 4087 - RNA, 19 nt, Artificial Sequence
  Description of Artificial Sequence: Synthetic oligonucleotide
guugaguccauggcagcag

SEQ ID NO: 4088 - RNA, 19 nt, Artificial Sequence
  Description of Artificial Sequence: Synthetic oligonucleotide
uguugaguccauggcagca

SEQ ID NO: 4089 - RNA, 19 nt, Artificial Sequence
  Description of Artificial Sequence: Synthetic oligonucleotide
guguugaguccauggcagc

SEQ ID NO: 4090 - RNA, 19 nt, Artificial Sequence
  Description of Artificial Sequence: Synthetic oligonucleotide
aguguugaguccauggcag

SEQ ID NO: 4091 - RNA, 19 nt, Artificial Sequence
  Description of Artificial Sequence: Synthetic oligonucleotide
gaguguugaguccauggca

SEQ ID NO: 4092 - RNA, 19 nt, Artificial Sequence
  Description of Artificial Sequence: Synthetic oligonucleotide
cgaguguugaguccauggc

SEQ ID NO: 4093 - RNA, 19 nt, Artificial Sequence
  Description of Artificial Sequence: Synthetic oligonucleotide
gcgaguguugaguccaugg

SEQ ID NO: 4094 - RNA, 19 nt, Artificial Sequence
  Description of Artificial Sequence: Synthetic oligonucleotide
ggcgaguguugaguccaug

SEQ ID NO: 4095 - RNA, 19 nt, Artificial Sequence
  Description of Artificial Sequence: Synthetic oligonucleotide
gggcgaguguugaguccau

SEQ ID NO: 4096 - RNA, 19 nt, Artificial Sequence
  Description of Artificial Sequence: Synthetic oligonucleotide
ggggcgaguguugagucca

SEQ ID NO: 4097 - RNA, 19 nt, Artificial Sequence
  Description of Artificial Sequence: Synthetic oligonucleotide
uggggcgaguguugagucc

SEQ ID NO: 4098 - RNA, 19 nt, Artificial Sequence
  Description of Artificial Sequence: Synthetic oligonucleotide
guggggcgaguguugaguc

SEQ ID NO: 4099 - RNA, 19 nt, Artificial Sequence
  Description of Artificial Sequence: Synthetic oligonucleotide
uguggggcgaguguugagu

SEQ ID NO: 4100 - RNA, 19 nt, Artificial Sequence
  Description of Artificial Sequence: Synthetic oligonucleotide
guguggggcgaguguugag

SEQ ID NO: 4101 - RNA, 19 nt, Artificial Sequence
  Description of Artificial Sequence: Synthetic oligonucleotide
cguguggggcgaguguuga

SEQ ID NO: 4102 - RNA, 19 nt, Artificial Sequence
  Description of Artificial Sequence: Synthetic oligonucleotide
ucguguggggcgaguguug

SEQ ID NO: 4103 - RNA, 19 nt, Artificial Sequence
  Description of Artificial Sequence: Synthetic oligonucleotide
cucguguggggcgaguguu

SEQ ID NO: 4104 - RNA, 19 nt, Artificial Sequence
  Description of Artificial Sequence: Synthetic oligonucleotide
ccucguguggggcgagugu

SEQ ID NO: 4105 - RNA, 19 nt, Artificial Sequence
  Description of Artificial Sequence: Synthetic oligonucleotide
gccucguguggggcgagug

SEQ ID NO: 4106 - RNA, 19 nt, Artificial Sequence
  Description of Artificial Sequence: Synthetic oligonucleotide
agccucguguggggcgagu

SEQ ID NO: 4107 - RNA, 19 nt, Artificial Sequence
  Description of Artificial Sequence: Synthetic oligonucleotide
cagccucguguggggcgag

SEQ ID NO: 4108 - RNA, 19 nt, Artificial Sequence
  Description of Artificial Sequence: Synthetic oligonucleotide
gcagccucguguggggcga

SEQ ID NO: 4109 - RNA, 19 nt, Artificial Sequence
  Description of Artificial Sequence: Synthetic oligonucleotide
cgcagccucguguggggcg

SEQ ID NO: 4110 - RNA, 19 nt, Artificial Sequence
  Description of Artificial Sequence: Synthetic oligonucleotide
ccgcagccucguguggggc

SEQ ID NO: 4111 - RNA, 19 nt, Artificial Sequence
  Description of Artificial Sequence: Synthetic oligonucleotide
gccgcagccucgugugggg

SEQ ID NO: 4112 - RNA, 19 nt, Artificial Sequence
  Description of Artificial Sequence: Synthetic oligonucleotide
cgccgcagccucguguggg

SEQ ID NO: 4113 - RNA, 19 nt, Artificial Sequence
  Description of Artificial Sequence: Synthetic oligonucleotide
acgccgcagccucgugugg

SEQ ID NO: 4114 - RNA, 19 nt, Artificial Sequence
  Description of Artificial Sequence: Synthetic oligonucleotide
aacgccgcagccucgugug

SEQ ID NO: 4115 - RNA, 19 nt, Artificial Sequence
  Description of Artificial Sequence: Synthetic oligonucleotide
gaacgccgcagccucgugu

SEQ ID NO: 4116 - RNA, 19 nt, Artificial Sequence
  Description of Artificial Sequence: Synthetic oligonucleotide
agaacgccgcagccucgug

SEQ ID NO: 4117 - RNA, 19 nt, Artificial Sequence
  Description of Artificial Sequence: Synthetic oligonucleotide
cagaacgccgcagccucgu

SEQ ID NO: 4118 - RNA, 19 nt, Artificial Sequence
  Description of Artificial Sequence: Synthetic oligonucleotide
ccagaacgccgcagccucg

SEQ ID NO: 4119 - RNA, 19 nt, Artificial Sequence
  Description of Artificial Sequence: Synthetic oligonucleotide
cccagaacgccgcagccuc

SEQ ID NO: 4120 - RNA, 19 nt, Artificial Sequence
  Description of Artificial Sequence: Synthetic oligonucleotide
gcccagaacgccgcagccu

SEQ ID NO: 4121 - RNA, 19 nt, Artificial Sequence
  Description of Artificial Sequence: Synthetic oligonucleotide
cgcccagaacgccgcagcc

SEQ ID NO: 4122 - RNA, 19 nt, Artificial Sequence
  Description of Artificial Sequence: Synthetic oligonucleotide
gcgcccagaacgccgcagc

SEQ ID NO: 4123 - RNA, 19 nt, Artificial Sequence
  Description of Artificial Sequence: Synthetic oligonucleotide
agcgcccagaacgccgcag

SEQ ID NO: 4124 - RNA, 19 nt, Artificial Sequence
  Description of Artificial Sequence: Synthetic oligonucleotide
cagcgcccagaacgccgca

SEQ ID NO: 4125 - RNA, 19 nt, Artificial Sequence
  Description of Artificial Sequence: Synthetic oligonucleotide
acagcgcccagaacgccgc

SEQ ID NO: 4126 - RNA, 19 nt, Artificial Sequence
  Description of Artificial Sequence: Synthetic oligonucleotide
cacagcgcccagaacgccg

SEQ ID NO: 4127 - RNA, 19 nt, Artificial Sequence
  Description of Artificial Sequence: Synthetic oligonucleotide
ucacagcgcccagaacgcc

SEQ ID NO: 4128 - RNA, 19 nt, Artificial Sequence
  Description of Artificial Sequence: Synthetic oligonucleotide
gucacagcgcccagaacgc

SEQ ID NO: 4129 - RNA, 19 nt, Artificial Sequence
  Description of Artificial Sequence: Synthetic oligonucleotide
ggucacagcgcccagaacg

SEQ ID NO: 4130 - RNA, 19 nt, Artificial Sequence
  Description of Artificial Sequence: Synthetic oligonucleotide
aggucacagcgcccagaac

SEQ ID NO: 4131 - RNA, 19 nt, Artificial Sequence
  Description of Artificial Sequence: Synthetic oligonucleotide
gaggucacagcgcccagaa

SEQ ID NO: 4132 - RNA, 19 nt, Artificial Sequence
  Description of Artificial Sequence: Synthetic oligonucleotide
agaggucacagcgcccaga

SEQ ID NO: 4133 - RNA, 19 nt, Artificial Sequence
  Description of Artificial Sequence: Synthetic oligonucleotide
aagaggucacagcgcccag

SEQ ID NO: 4134 - RNA, 19 nt, Artificial Sequence
  Description of Artificial Sequence: Synthetic oligonucleotide
gaagaggucacagcgccca

SEQ ID NO: 4135 - RNA, 19 nt, Artificial Sequence
  Description of Artificial Sequence: Synthetic oligonucleotide
ggaagaggucacagcgccc

SEQ ID NO: 4136 - RNA, 19 nt, Artificial Sequence
  Description of Artificial Sequence: Synthetic oligonucleotide
uggaagaggucacagcgcc

SEQ ID NO: 4137 - RNA, 19 nt, Artificial Sequence
  Description of Artificial Sequence: Synthetic oligonucleotide
cuggaagaggucacagcgc

SEQ ID NO: 4138 - RNA, 19 nt, Artificial Sequence
  Description of Artificial Sequence: Synthetic oligonucleotide
ucuggaagaggucacagcg

SEQ ID NO: 4139 - RNA, 19 nt, Artificial Sequence
  Description of Artificial Sequence: Synthetic oligonucleotide
uucuggaagaggucacagc

SEQ ID NO: 4140 - RNA, 19 nt, Artificial Sequence
  Description of Artificial Sequence: Synthetic oligonucleotide
cuucuggaagaggucacag

SEQ ID NO: 4141 - RNA, 19 nt, Artificial Sequence
  Description of Artificial Sequence: Synthetic oligonucleotide
ucuucuggaagaggucaca

SEQ ID NO: 4142 - RNA, 19 nt, Artificial Sequence
  Description of Artificial Sequence: Synthetic oligonucleotide
uucuucuggaagaggucac

SEQ ID NO: 4143 - RNA, 19 nt, Artificial Sequence
  Description of Artificial Sequence: Synthetic oligonucleotide
uuucuucuggaagagguca

SEQ ID NO: 4144 - RNA, 19 nt, Artificial Sequence
  Description of Artificial Sequence: Synthetic oligonucleotide
cuuucuucuggaagagguc

SEQ ID NO: 4145 - RNA, 19 nt, Artificial Sequence
  Description of Artificial Sequence: Synthetic oligonucleotide
ucuuucuucuggaagaggu

SEQ ID NO: 4146 - RNA, 19 nt, Artificial Sequence
  Description of Artificial Sequence: Synthetic oligonucleotide
gucuuucuucuggaagagg

SEQ ID NO: 4147 - RNA, 19 nt, Artificial Sequence
  Description of Artificial Sequence: Synthetic oligonucleotide
agucuuucuucuggaagag

SEQ ID NO: 4148 - RNA, 19 nt, Artificial Sequence
  Description of Artificial Sequence: Synthetic oligonucleotide
uagucuuucuucuggaaga

SEQ ID NO: 4149 - RNA, 19 nt, Artificial Sequence
  Description of Artificial Sequence: Synthetic oligonucleotide
guagucuuucuucuggaag

SEQ ID NO: 4150 - RNA, 19 nt, Artificial Sequence
  Description of Artificial Sequence: Synthetic oligonucleotide
cguagucuuucuucuggaa

SEQ ID NO: 4151 - RNA, 19 nt, Artificial Sequence
  Description of Artificial Sequence: Synthetic oligonucleotide
acguagucuuucuucugga

SEQ ID NO: 4152 - RNA, 19 nt, Artificial Sequence
  Description of Artificial Sequence: Synthetic oligonucleotide
uacguagucuuucuucugg

SEQ ID NO: 4153 - RNA, 19 nt, Artificial Sequence
  Description of Artificial Sequence: Synthetic oligonucleotide
guacguagucuuucuucug

SEQ ID NO: 4154 - RNA, 19 nt, Artificial Sequence
  Description of Artificial Sequence: Synthetic oligonucleotide
cguacguagucuuucuucu

SEQ ID NO: 4155 - RNA, 19 nt, Artificial Sequence
  Description of Artificial Sequence: Synthetic oligonucleotide
ccguacguagucuuucuuc

SEQ ID NO: 4156 - RNA, 19 nt, Artificial Sequence
  Description of Artificial Sequence: Synthetic oligonucleotide
uccguacguagucuuucuu

SEQ ID NO: 4157 - RNA, 19 nt, Artificial Sequence
  Description of Artificial Sequence: Synthetic oligonucleotide
guccguacguagucuuucu

SEQ ID NO: 4158 - RNA, 19 nt, Artificial Sequence
  Description of Artificial Sequence: Synthetic oligonucleotide
gguccguacguagucuuuc

SEQ ID NO: 4159 - RNA, 19 nt, Artificial Sequence
  Description of Artificial Sequence: Synthetic oligonucleotide
agguccguacguagucuuu

SEQ ID NO: 4160 - RNA, 19 nt, Artificial Sequence
  Description of Artificial Sequence: Synthetic oligonucleotide
cagguccguacguagucuu

SEQ ID NO: 4161 - RNA, 19 nt, Artificial Sequence
  Description of Artificial Sequence: Synthetic oligonucleotide
gcagguccguacguagucu

SEQ ID NO: 4162 - RNA, 19 nt, Artificial Sequence
  Description of Artificial Sequence: Synthetic oligonucleotide
ugcagguccguacguaguc

SEQ ID NO: 4163 - RNA, 19 nt, Artificial Sequence
  Description of Artificial Sequence: Synthetic oligonucleotide
augcagguccguacguagu

SEQ ID NO: 4164 - RNA, 19 nt, Artificial Sequence
  Description of Artificial Sequence: Synthetic oligonucleotide
gaugcagguccguacguag

SEQ ID NO: 4165 - RNA, 19 nt, Artificial Sequence
  Description of Artificial Sequence: Synthetic oligonucleotide
ugaugcagguccguacgua

SEQ ID NO: 4166 - RNA, 19 nt, Artificial Sequence
  Description of Artificial Sequence: Synthetic oligonucleotide
augaugcagguccguacgu

SEQ ID NO: 4167 - RNA, 19 nt, Artificial Sequence
  Description of Artificial Sequence: Synthetic oligonucleotide
caugaugcagguccguacg

SEQ ID NO: 4168 - RNA, 19 nt, Artificial Sequence
  Description of Artificial Sequence: Synthetic oligonucleotide
ucaugaugcagguccguac

SEQ ID NO: 4169 - RNA, 19 nt, Artificial Sequence
  Description of Artificial Sequence: Synthetic oligonucleotide
uucaugaugcagguccgua

SEQ ID NO: 4170 - RNA, 19 nt, Artificial Sequence
  Description of Artificial Sequence: Synthetic oligonucleotide
guucaugaugcagguccgu

SEQ ID NO: 4171 - RNA, 19 nt, Artificial Sequence
  Description of Artificial Sequence: Synthetic oligonucleotide
uguucaugaugcagguccg

SEQ ID NO: 4172 - RNA, 19 nt, Artificial Sequence
  Description of Artificial Sequence: Synthetic oligonucleotide
uuguucaugaugcaggucc

SEQ ID NO: 4173 - RNA, 19 nt, Artificial Sequence
  Description of Artificial Sequence: Synthetic oligonucleotide
auuguucaugaugcagguc

SEQ ID NO: 4174 - RNA, 19 nt, Artificial Sequence
  Description of Artificial Sequence: Synthetic oligonucleotide
cauuguucaugaugcaggu

SEQ ID NO: 4175 - RNA, 19 nt, Artificial Sequence
  Description of Artificial Sequence: Synthetic oligonucleotide
ccauuguucaugaugcagg

SEQ ID NO: 4176 - RNA, 19 nt, Artificial Sequence
  Description of Artificial Sequence: Synthetic oligonucleotide
cccauuguucaugaugcag

SEQ ID NO: 4177 - RNA, 19 nt, Artificial Sequence
  Description of Artificial Sequence: Synthetic oligonucleotide
ccccauuguucaugaugca

SEQ ID NO: 4178 - RNA, 19 nt, Artificial Sequence
  Description of Artificial Sequence: Synthetic oligonucleotide
accccauuguucaugaugc

SEQ ID NO: 4179 - RNA, 19 nt, Artificial Sequence
  Description of Artificial Sequence: Synthetic oligonucleotide
aaccccauuguucaugaug

SEQ ID NO: 4180 - RNA, 19 nt, Artificial Sequence
  Description of Artificial Sequence: Synthetic oligonucleotide
caaccccauuguucaugau

SEQ ID NO: 4181 - RNA, 19 nt, Artificial Sequence
  Description of Artificial Sequence: Synthetic oligonucleotide
ccaaccccauuguucauga

SEQ ID NO: 4182 - RNA, 19 nt, Artificial Sequence
  Description of Artificial Sequence: Synthetic oligonucleotide
cccaaccccauuguucaug

SEQ ID NO: 4183 - RNA, 19 nt, Artificial Sequence
  Description of Artificial Sequence: Synthetic oligonucleotide
acccaaccccauuguucau

SEQ ID NO: 4184 - RNA, 19 nt, Artificial Sequence
  Description of Artificial Sequence: Synthetic oligonucleotide
uacccaaccccauuguuca

SEQ ID NO: 4185 - RNA, 19 nt, Artificial Sequence
  Description of Artificial Sequence: Synthetic oligonucleotide
guacccaaccccauuguuc

SEQ ID NO: 4186 - RNA, 19 nt, Artificial Sequence
  Description of Artificial Sequence: Synthetic oligonucleotide
gguacccaaccccauuguu

SEQ ID NO: 4187 - RNA, 19 nt, Artificial Sequence
  Description of Artificial Sequence: Synthetic oligonucleotide
cgguacccaaccccauugu

SEQ ID NO: 4188 - RNA, 19 nt, Artificial Sequence
  Description of Artificial Sequence: Synthetic oligonucleotide
ccgguacccaaccccauug

SEQ ID NO: 4189 - RNA, 19 nt, Artificial Sequence
  Description of Artificial Sequence: Synthetic oligonucleotide
cccgguacccaaccccauu

SEQ ID NO: 4190 - RNA, 19 nt, Artificial Sequence
  Description of Artificial Sequence: Synthetic oligonucleotide
ccccgguacccaaccccau

SEQ ID NO: 4191 - RNA, 19 nt, Artificial Sequence
  Description of Artificial Sequence: Synthetic oligonucleotide
gccccgguacccaacccca

SEQ ID NO: 4192 - RNA, 19 nt, Artificial Sequence
  Description of Artificial Sequence: Synthetic oligonucleotide
ugccccgguacccaacccc

SEQ ID NO: 4193 - RNA, 19 nt, Artificial Sequence
  Description of Artificial Sequence: Synthetic oligonucleotide
gugccccgguacccaaccc

SEQ ID NO: 4194 - RNA, 19 nt, Artificial Sequence
  Description of Artificial Sequence: Synthetic oligonucleotide
ggugccccgguacccaacc

SEQ ID NO: 4195 - RNA, 19 nt, Artificial Sequence
  Description of Artificial Sequence: Synthetic oligonucleotide
uggugccccgguacccaac

SEQ ID NO: 4196 - RNA, 19 nt, Artificial Sequence
  Description of Artificial Sequence: Synthetic oligonucleotide
auggugccccgguacccaa

SEQ ID NO: 4197 - RNA, 19 nt, Artificial Sequence
  Description of Artificial Sequence: Synthetic oligonucleotide
cauggugccccgguaccca

SEQ ID NO: 4198 - RNA, 19 nt, Artificial Sequence
  Description of Artificial Sequence: Synthetic oligonucleotide
ccauggugccccgguaccc

SEQ ID NO: 4199 - RNA, 19 nt, Artificial Sequence
  Description of Artificial Sequence: Synthetic oligonucleotide
gccauggugccccgguacc

SEQ ID NO: 4200 - RNA, 19 nt, Artificial Sequence
  Description of Artificial Sequence: Synthetic oligonucleotide
ggccauggugccccgguac

SEQ ID NO: 4201 - RNA, 19 nt, Artificial Sequence
  Description of Artificial Sequence: Synthetic oligonucleotide
uggccauggugccccggua

SEQ ID NO: 4202 - RNA, 19 nt, Artificial Sequence
  Description of Artificial Sequence: Synthetic oligonucleotide
guggccauggugccccggu

SEQ ID NO: 4203 - RNA, 19 nt, Artificial Sequence
  Description of Artificial Sequence: Synthetic oligonucleotide
cguggccauggugccccgg

SEQ ID NO: 4204 - RNA, 19 nt, Artificial Sequence
  Description of Artificial Sequence: Synthetic oligonucleotide
ucguggccauggugccccg

SEQ ID NO: 4205 - RNA, 19 nt, Artificial Sequence
  Description of Artificial Sequence: Synthetic oligonucleotide
gucguggccauggugcccc

SEQ ID NO: 4206 - RNA, 19 nt, Artificial Sequence
  Description of Artificial Sequence: Synthetic oligonucleotide
ggucguggccauggugccc

SEQ ID NO: 4207 - RNA, 19 nt, Artificial Sequence
  Description of Artificial Sequence: Synthetic oligonucleotide
cggucguggccauggugcc

SEQ ID NO: 4208 - RNA, 19 nt, Artificial Sequence
  Description of Artificial Sequence: Synthetic oligonucleotide
acggucguggccauggugc

SEQ ID NO: 4209 - RNA, 19 nt, Artificial Sequence
  Description of Artificial Sequence: Synthetic oligonucleotide
cacggucguggccauggug

SEQ ID NO: 4210 - RNA, 19 nt, Artificial Sequence
  Description of Artificial Sequence: Synthetic oligonucleotide
ccacggucguggccauggu

SEQ ID NO: 4211 - RNA, 19 nt, Artificial Sequence
  Description of Artificial Sequence: Synthetic oligonucleotide
cccacggucguggccaugg

SEQ ID NO: 4212 - RNA, 19 nt, Artificial Sequence
  Description of Artificial Sequence: Synthetic oligonucleotide
acccacggucguggccaug

SEQ ID NO: 4213 - RNA, 19 nt, Artificial Sequence
  Description of Artificial Sequence: Synthetic oligonucleotide
cacccacggucguggccau

SEQ ID NO: 4214 - RNA, 19 nt, Artificial Sequence
  Description of Artificial Sequence: Synthetic oligonucleotide
ccacccacggucguggcca

SEQ ID NO: 4215 - RNA, 19 nt, Artificial Sequence
  Description of Artificial Sequence: Synthetic oligonucleotide
gccacccacggucguggcc

SEQ ID NO: 4216 - RNA, 19 nt, Artificial Sequence
  Description of Artificial Sequence: Synthetic oligonucleotide
ggccacccacggucguggc

SEQ ID NO: 4217 - RNA, 19 nt, Artificial Sequence
  Description of Artificial Sequence: Synthetic oligonucleotide
aggccacccacggucgugg

SEQ ID NO: 4218 - RNA, 19 nt, Artificial Sequence
  Description of Artificial Sequence: Synthetic oligonucleotide
caggccacccacggucgug

SEQ ID NO: 4219 - RNA, 19 nt, Artificial Sequence
  Description of Artificial Sequence: Synthetic oligonucleotide
gcaggccacccacggucgu

SEQ ID NO: 4220 - RNA, 19 nt, Artificial Sequence
  Description of Artificial Sequence: Synthetic oligonucleotide
ggcaggccacccacggucg

SEQ ID NO: 4221 - RNA, 19 nt, Artificial Sequence
  Description of Artificial Sequence: Synthetic oligonucleotide
gggcaggccacccacgguc

SEQ ID NO: 4222 - RNA, 19 nt, Artificial Sequence
  Description of Artificial Sequence: Synthetic oligonucleotide
agggcaggccacccacggu

SEQ ID NO: 4223 - RNA, 19 nt, Artificial Sequence
  Description of Artificial Sequence: Synthetic oligonucleotide
cagggcaggccacccacgg

SEQ ID NO: 4224 - RNA, 19 nt, Artificial Sequence
  Description of Artificial Sequence: Synthetic oligonucleotide
gcagggcaggccacccacg

SEQ ID NO: 4225 - RNA, 19 nt, Artificial Sequence
  Description of Artificial Sequence: Synthetic oligonucleotide
ggcagggcaggccacccac

SEQ ID NO: 4226 - RNA, 19 nt, Artificial Sequence
  Description of Artificial Sequence: Synthetic oligonucleotide
uggcagggcaggccaccca

SEQ ID NO: 4227 - RNA, 19 nt, Artificial Sequence
  Description of Artificial Sequence: Synthetic oligonucleotide
cuggcagggcaggccaccc

SEQ ID NO: 4228 - RNA, 19 nt, Artificial Sequence
  Description of Artificial Sequence: Synthetic oligonucleotide
ccuggcagggcaggccacc

SEQ ID NO: 4229 - RNA, 19 nt, Artificial Sequence
  Description of Artificial Sequence: Synthetic oligonucleotide
gccuggcagggcaggccac

SEQ ID NO: 4230 - RNA, 19 nt, Artificial Sequence
  Description of Artificial Sequence: Synthetic oligonucleotide
agccuggcagggcaggcca

SEQ ID NO: 4231 - RNA, 19 nt, Artificial Sequence
  Description of Artificial Sequence: Synthetic oligonucleotide
aagccuggcagggcaggcc

SEQ ID NO: 4232 - RNA, 19 nt, Artificial Sequence
  Description of Artificial Sequence: Synthetic oligonucleotide
caagccuggcagggcaggc

SEQ ID NO: 4233 - RNA, 19 nt, Artificial Sequence
  Description of Artificial Sequence: Synthetic oligonucleotide
ccaagccuggcagggcagg

SEQ ID NO: 4234 - RNA, 19 nt, Artificial Sequence
  Description of Artificial Sequence: Synthetic oligonucleotide
uccaagccuggcagggcag

SEQ ID NO: 4235 - RNA, 19 nt, Artificial Sequence
  Description of Artificial Sequence: Synthetic oligonucleotide
cuccaagccuggcagggca

SEQ ID NO: 4236 - RNA, 19 nt, Artificial Sequence
  Description of Artificial Sequence: Synthetic oligonucleotide
gcuccaagccuggcagggc

SEQ ID NO: 4237 - RNA, 19 nt, Artificial Sequence
  Description of Artificial Sequence: Synthetic oligonucleotide
ggcuccaagccuggcaggg

SEQ ID NO: 4238 - RNA, 19 nt, Artificial Sequence
  Description of Artificial Sequence: Synthetic oligonucleotide
uggcuccaagccuggcagg

SEQ ID NO: 4239 - RNA, 19 nt, Artificial Sequence
  Description of Artificial Sequence: Synthetic oligonucleotide
guggcuccaagccuggcag

SEQ ID NO: 4240 - RNA, 19 nt, Artificial Sequence
  Description of Artificial Sequence: Synthetic oligonucleotide
uguggcuccaagccuggca

SEQ ID NO: 4241 - RNA, 19 nt, Artificial Sequence
  Description of Artificial Sequence: Synthetic oligonucleotide
uuguggcuccaagccuggc

SEQ ID NO: 4242 - RNA, 19 nt, Artificial Sequence
  Description of Artificial Sequence: Synthetic oligonucleotide
cuuguggcuccaagccugg

SEQ ID NO: 4243 - RNA, 19 nt, Artificial Sequence
  Description of Artificial Sequence: Synthetic oligonucleotide
acuuguggcuccaagccug

SEQ ID NO: 4244 - RNA, 19 nt, Artificial Sequence
  Description of Artificial Sequence: Synthetic oligonucleotide
aacuuguggcuccaagccu

SEQ ID NO: 4245 - RNA, 19 nt, Artificial Sequence
  Description of Artificial Sequence: Synthetic oligonucleotide
gaacuuguggcuccaagcc

SEQ ID NO: 4246 - RNA, 19 nt, Artificial Sequence
  Description of Artificial Sequence: Synthetic oligonucleotide
ggaacuuguggcuccaagc

SEQ ID NO: 4247 - RNA, 19 nt, Artificial Sequence
  Description of Artificial Sequence: Synthetic oligonucleotide
gggaacuuguggcuccaag

SEQ ID NO: 4248 - RNA, 19 nt, Artificial Sequence
  Description of Artificial Sequence: Synthetic oligonucleotide
ugggaacuuguggcuccaa

SEQ ID NO: 4249 - RNA, 19 nt, Artificial Sequence
  Description of Artificial Sequence: Synthetic oligonucleotide
uugggaacuuguggcucca

SEQ ID NO: 4250 - RNA, 19 nt, Artificial Sequence
  Description of Artificial Sequence: Synthetic oligonucleotide
uuugggaacuuguggcucc

SEQ ID NO: 4251 - RNA, 19 nt, Artificial Sequence
  Description of Artificial Sequence: Synthetic oligonucleotide
auuugggaacuuguggcuc

SEQ ID NO: 4252 - RNA, 19 nt, Artificial Sequence
  Description of Artificial Sequence: Synthetic oligonucleotide
cauuugggaacuuguggcu

SEQ ID NO: 4253 - RNA, 19 nt, Artificial Sequence
  Description of Artificial Sequence: Synthetic oligonucleotide
ucauuugggaacuuguggc

SEQ ID NO: 4254 - RNA, 19 nt, Artificial Sequence
  Description of Artificial Sequence: Synthetic oligonucleotide
aucauuugggaacuugugg

SEQ ID NO: 4255 - RNA, 19 nt, Artificial Sequence
  Description of Artificial Sequence: Synthetic oligonucleotide
gaucauuugggaacuugug

SEQ ID NO: 4256 - RNA, 19 nt, Artificial Sequence
  Description of Artificial Sequence: Synthetic oligonucleotide
ugaucauuugggaacuugu

SEQ ID NO: 4257 - RNA, 19 nt, Artificial Sequence
  Description of Artificial Sequence: Synthetic oligonucleotide
gugaucauuugggaacuug

SEQ ID NO: 4258 - RNA, 19 nt, Artificial Sequence
  Description of Artificial Sequence: Synthetic oligonucleotide
ugugaucauuugggaacuu

SEQ ID NO: 4259 - RNA, 19 nt, Artificial Sequence
  Description of Artificial Sequence: Synthetic oligonucleotide
uugugaucauuugggaacu

SEQ ID NO: 4260 - RNA, 19 nt, Artificial Sequence
  Description of Artificial Sequence: Synthetic oligonucleotide
cuugugaucauuugggaac

SEQ ID NO: 4261 - RNA, 19 nt, Artificial Sequence
  Description of Artificial Sequence: Synthetic oligonucleotide
acuugugaucauuugggaa

SEQ ID NO: 4262 - RNA, 19 nt, Artificial Sequence
  Description of Artificial Sequence: Synthetic oligonucleotide
uacuugugaucauuuggga

SEQ ID NO: 4263 - RNA, 19 nt, Artificial Sequence
  Description of Artificial Sequence: Synthetic oligonucleotide
guacuugugaucauuuggg

SEQ ID NO: 4264 - RNA, 19 nt, Artificial Sequence
  Description of Artificial Sequence: Synthetic oligonucleotide
uguacuugugaucauuugg

SEQ ID NO: 4265 - RNA, 19 nt, Artificial Sequence
  Description of Artificial Sequence: Synthetic oligonucleotide
guguacuugugaucauuug

SEQ ID NO: 4266 - RNA, 19 nt, Artificial Sequence
  Description of Artificial Sequence: Synthetic oligonucleotide
cguguacuugugaucauuu

SEQ ID NO: 4267 - RNA, 19 nt, Artificial Sequence
  Description of Artificial Sequence: Synthetic oligonucleotide
gcguguacuugugaucauu

SEQ ID NO: 4268 - RNA, 19 nt, Artificial Sequence
  Description of Artificial Sequence: Synthetic oligonucleotide
ggcguguacuugugaucau

SEQ ID NO: 4269 - RNA, 19 nt, Artificial Sequence
  Description of Artificial Sequence: Synthetic oligonucleotide
gggcguguacuugugauca

SEQ ID NO: 4270 - RNA, 19 nt, Artificial Sequence
  Description of Artificial Sequence: Synthetic oligonucleotide
ugggcguguacuugugauc

SEQ ID NO: 4271 - RNA, 19 nt, Artificial Sequence
  Description of Artificial Sequence: Synthetic oligonucleotide
gugggcguguacuugugau

SEQ ID NO: 4272 - RNA, 19 nt, Artificial Sequence
  Description of Artificial Sequence: Synthetic oligonucleotide
agugggcguguacuuguga

SEQ ID NO: 4273 - RNA, 19 nt, Artificial Sequence
  Description of Artificial Sequence: Synthetic oligonucleotide
gagugggcguguacuugug

SEQ ID NO: 4274 - RNA, 19 nt, Artificial Sequence
  Description of Artificial Sequence: Synthetic oligonucleotide
agagugggcguguacuugu

SEQ ID NO: 4275 - RNA, 19 nt, Artificial Sequence
  Description of Artificial Sequence: Synthetic oligonucleotide
gagagugggcguguacuug

SEQ ID NO: 4276 - RNA, 19 nt, Artificial Sequence
  Description of Artificial Sequence: Synthetic oligonucleotide
ggagagugggcguguacuu

SEQ ID NO: 4277 - RNA, 19 nt, Artificial Sequence
  Description of Artificial Sequence: Synthetic oligonucleotide
cggagagugggcguguacu

SEQ ID NO: 4278 - RNA, 19 nt, Artificial Sequence
  Description of Artificial Sequence: Synthetic oligonucleotide
ccggagagugggcguguac

SEQ ID NO: 4279 - RNA, 19 nt, Artificial Sequence
  Description of Artificial Sequence: Synthetic oligonucleotide
uccggagagugggcgugua

SEQ ID NO: 4280 - RNA, 19 nt, Artificial Sequence
  Description of Artificial Sequence: Synthetic oligonucleotide
uuccggagagugggcgugu

SEQ ID NO: 4281 - RNA, 19 nt, Artificial Sequence
  Description of Artificial Sequence: Synthetic oligonucleotide
auuccggagagugggcgug

SEQ ID NO: 4282 - RNA, 19 nt, Artificial Sequence
  Description of Artificial Sequence: Synthetic oligonucleotide
cauuccggagagugggcgu

SEQ ID NO: 4283 - RNA, 19 nt, Artificial Sequence
  Description of Artificial Sequence: Synthetic oligonucleotide
ccauuccggagagugggcg

SEQ ID NO: 4284 - RNA, 19 nt, Artificial Sequence
  Description of Artificial Sequence: Synthetic oligonucleotide
gccauuccggagagugggc

SEQ ID NO: 4285 - RNA, 19 nt, Artificial Sequence
  Description of Artificial Sequence: Synthetic oligonucleotide
ggccauuccggagaguggg

SEQ ID NO: 4286 - RNA, 19 nt, Artificial Sequence
  Description of Artificial Sequence: Synthetic oligonucleotide
aggccauuccggagagugg

SEQ ID NO: 4287 - RNA, 19 nt, Artificial Sequence
  Description of Artificial Sequence: Synthetic oligonucleotide
caggccauuccggagagug

SEQ ID NO: 4288 - RNA, 19 nt, Artificial Sequence
  Description of Artificial Sequence: Synthetic oligonucleotide
ccaggccauuccggagagu

SEQ ID NO: 4289 - RNA, 19 nt, Artificial Sequence
  Description of Artificial Sequence: Synthetic oligonucleotide
uccaggccauuccggagag

SEQ ID NO: 4290 - RNA, 19 nt, Artificial Sequence
  Description of Artificial Sequence: Synthetic oligonucleotide
uuccaggccauuccggaga

SEQ ID NO: 4291 - RNA, 19 nt, Artificial Sequence
  Description of Artificial Sequence: Synthetic oligonucleotide
cuuccaggccauuccggag

SEQ ID NO: 4292 - RNA, 19 nt, Artificial Sequence
  Description of Artificial Sequence: Synthetic oligonucleotide
ucuuccaggccauuccgga

SEQ ID NO: 4293 - RNA, 19 nt, Artificial Sequence
  Description of Artificial Sequence: Synthetic oligonucleotide
cucuuccaggccauuccgg

SEQ ID NO: 4294 - RNA, 19 nt, Artificial Sequence
  Description of Artificial Sequence: Synthetic oligonucleotide
ucucuuccaggccauuccg

SEQ ID NO: 4295 - RNA, 19 nt, Artificial Sequence
  Description of Artificial Sequence: Synthetic oligonucleotide
uucucuuccaggccauucc

SEQ ID NO: 4296 - RNA, 19 nt, Artificial Sequence
  Description of Artificial Sequence: Synthetic oligonucleotide
guucucuuccaggccauuc

SEQ ID NO: 4297 - RNA, 19 nt, Artificial Sequence
  Description of Artificial Sequence: Synthetic oligonucleotide
aguucucuuccaggccauu

SEQ ID NO: 4298 - RNA, 19 nt, Artificial Sequence
  Description of Artificial Sequence: Synthetic oligonucleotide
aaguucucuuccaggccau

SEQ ID NO: 4299 - RNA, 19 nt, Artificial Sequence
  Description of Artificial Sequence: Synthetic oligonucleotide
gaaguucucuuccaggcca

SEQ ID NO: 4300 - RNA, 19 nt, Artificial Sequence
  Description of Artificial Sequence: Synthetic oligonucleotide
agaaguucucuuccaggcc

SEQ ID NO: 4301 - RNA, 19 nt, Artificial Sequence
  Description of Artificial Sequence: Synthetic oligonucleotide
cagaaguucucuuccaggc

SEQ ID NO: 4302 - RNA, 19 nt, Artificial Sequence
  Description of Artificial Sequence: Synthetic oligonucleotide
gcagaaguucucuuccagg

SEQ ID NO: 4303 - RNA, 19 nt, Artificial Sequence
  Description of Artificial Sequence: Synthetic oligonucleotide
ggcagaaguucucuuccag

SEQ ID NO: 4304 - RNA, 19 nt, Artificial Sequence
  Description of Artificial Sequence: Synthetic oligonucleotide
cggcagaaguucucuucca

SEQ ID NO: 4305 - RNA, 19 nt, Artificial Sequence
  Description of Artificial Sequence: Synthetic oligonucleotide
acggcagaaguucucuucc

SEQ ID NO: 4306 - RNA, 19 nt, Artificial Sequence
  Description of Artificial Sequence: Synthetic oligonucleotide
uacggcagaaguucucuuc

SEQ ID NO: 4307 - RNA, 19 nt, Artificial Sequence
  Description of Artificial Sequence: Synthetic oligonucleotide
uuacggcagaaguucucuu

SEQ ID NO: 4308 - RNA, 19 nt, Artificial Sequence
  Description of Artificial Sequence: Synthetic oligonucleotide
guuacggcagaaguucucu

SEQ ID NO: 4309 - RNA, 19 nt, Artificial Sequence
  Description of Artificial Sequence: Synthetic oligonucleotide
gguuacggcagaaguucuc

SEQ ID NO: 4310 - RNA, 19 nt, Artificial Sequence
  Description of Artificial Sequence: Synthetic oligonucleotide
ggguuacggcagaaguucu

SEQ ID NO: 4311 - RNA, 19 nt, Artificial Sequence
  Description of Artificial Sequence: Synthetic oligonucleotide
aggguuacggcagaaguuc

SEQ ID NO: 4312 - RNA, 19 nt, Artificial Sequence
  Description of Artificial Sequence: Synthetic oligonucleotide
caggguuacggcagaaguu

SEQ ID NO: 4313 - RNA, 19 nt, Artificial Sequence
  Description of Artificial Sequence: Synthetic oligonucleotide
ucaggguuacggcagaagu

SEQ ID NO: 4314 - RNA, 19 nt, Artificial Sequence
  Description of Artificial Sequence: Synthetic oligonucleotide
aucaggguuacggcagaag

SEQ ID NO: 4315 - RNA, 19 nt, Artificial Sequence
  Description of Artificial Sequence: Synthetic oligonucleotide
caucaggguuacggcagaa

SEQ ID NO: 4316 - RNA, 19 nt, Artificial Sequence
  Description of Artificial Sequence: Synthetic oligonucleotide
ccaucaggguuacggcaga

SEQ ID NO: 4317 - RNA, 19 nt, Artificial Sequence
  Description of Artificial Sequence: Synthetic oligonucleotide
gccaucaggguuacggcag

SEQ ID NO: 4318 - RNA, 19 nt, Artificial Sequence
  Description of Artificial Sequence: Synthetic oligonucleotide
cgccaucaggguuacggca

SEQ ID NO: 4319 - RNA, 19 nt, Artificial Sequence
  Description of Artificial Sequence: Synthetic oligonucleotide
ucgccaucaggguuacggc

SEQ ID NO: 4320 - RNA, 19 nt, Artificial Sequence
  Description of Artificial Sequence: Synthetic oligonucleotide
gucgccaucaggguuacgg

SEQ ID NO: 4321 - RNA, 19 nt, Artificial Sequence
  Description of Artificial Sequence: Synthetic oligonucleotide
ggucgccaucaggguuacg

SEQ ID NO: 4322 - RNA, 19 nt, Artificial Sequence
  Description of Artificial Sequence: Synthetic oligonucleotide
gggucgccaucaggguuac

SEQ ID NO: 4323 - RNA, 19 nt, Artificial Sequence
  Description of Artificial Sequence: Synthetic oligonucleotide
ggggucgccaucaggguua

SEQ ID NO: 4324 - RNA, 19 nt, Artificial Sequence
  Description of Artificial Sequence: Synthetic oligonucleotide
cggggucgccaucaggguu

SEQ ID NO: 4325 - RNA, 19 nt, Artificial Sequence
  Description of Artificial Sequence: Synthetic oligonucleotide
ccggggucgccaucagggu

SEQ ID NO: 4326 - RNA, 19 nt, Artificial Sequence
  Description of Artificial Sequence: Synthetic oligonucleotide
uccggggucgccaucaggg

SEQ ID NO: 4327 - RNA, 19 nt, Artificial Sequence
  Description of Artificial Sequence: Synthetic oligonucleotide
cuccggggucgccaucagg

SEQ ID NO: 4328 - RNA, 19 nt, Artificial Sequence
  Description of Artificial Sequence: Synthetic oligonucleotide
ccuccggggucgccaucag

SEQ ID NO: 4329 - RNA, 19 nt, Artificial Sequence
  Description of Artificial Sequence: Synthetic oligonucleotide
accuccggggucgccauca

SEQ ID NO: 4330 - RNA, 19 nt, Artificial Sequence
  Description of Artificial Sequence: Synthetic oligonucleotide
gaccuccggggucgccauc

SEQ ID NO: 4331 - RNA, 19 nt, Artificial Sequence
  Description of Artificial Sequence: Synthetic oligonucleotide
ggaccuccggggucgccau

SEQ ID NO: 4332 - RNA, 19 nt, Artificial Sequence
  Description of Artificial Sequence: Synthetic oligonucleotide
aggaccuccggggucgcca

SEQ ID NO: 4333 - RNA, 19 nt, Artificial Sequence
  Description of Artificial Sequence: Synthetic oligonucleotide
aaggaccuccggggucgcc

SEQ ID NO: 4334 - RNA, 19 nt, Artificial Sequence
  Description of Artificial Sequence: Synthetic oligonucleotide
caaggaccuccggggucgc

SEQ ID NO: 4335 - RNA, 19 nt, Artificial Sequence
  Description of Artificial Sequence: Synthetic oligonucleotide
ccaaggaccuccggggucg

SEQ ID NO: 4336 - RNA, 19 nt, Artificial Sequence
  Description of Artificial Sequence: Synthetic oligonucleotide
accaaggaccuccgggguc

SEQ ID NO: 4337 - RNA, 19 nt, Artificial Sequence
  Description of Artificial Sequence: Synthetic oligonucleotide
caccaaggaccuccggggu

SEQ ID NO: 4338 - RNA, 19 nt, Artificial Sequence
  Description of Artificial Sequence: Synthetic oligonucleotide
gcaccaaggaccuccgggg

SEQ ID NO: 4339 - RNA, 19 nt, Artificial Sequence
  Description of Artificial Sequence: Synthetic oligonucleotide
agcaccaaggaccuccggg

SEQ ID NO: 4340 - RNA, 19 nt, Artificial Sequence
  Description of Artificial Sequence: Synthetic oligonucleotide
uagcaccaaggaccuccgg

SEQ ID NO: 4341 - RNA, 19 nt, Artificial Sequence
  Description of Artificial Sequence: Synthetic oligonucleotide
guagcaccaaggaccuccg

SEQ ID NO: 4342 - RNA, 19 nt, Artificial Sequence
  Description of Artificial Sequence: Synthetic oligonucleotide
uguagcaccaaggaccucc

SEQ ID NO: 4343 - RNA, 19 nt, Artificial Sequence
  Description of Artificial Sequence: Synthetic oligonucleotide
guguagcaccaaggaccuc

SEQ ID NO: 4344 - RNA, 19 nt, Artificial Sequence
  Description of Artificial Sequence: Synthetic oligonucleotide
uguguagcaccaaggaccu

SEQ ID NO: 4345 - RNA, 19 nt, Artificial Sequence
  Description of Artificial Sequence: Synthetic oligonucleotide
uuguguagcaccaaggacc

SEQ ID NO: 4346 - RNA, 19 nt, Artificial Sequence
  Description of Artificial Sequence: Synthetic oligonucleotide
guuguguagcaccaaggac

SEQ ID NO: 4347 - RNA, 19 nt, Artificial Sequence
  Description of Artificial Sequence: Synthetic oligonucleotide
uguuguguagcaccaagga

SEQ ID NO: 4348 - RNA, 19 nt, Artificial Sequence
  Description of Artificial Sequence: Synthetic oligonucleotide
cuguuguguagcaccaagg

SEQ ID NO: 4349 - RNA, 19 nt, Artificial Sequence
  Description of Artificial Sequence: Synthetic oligonucleotide
ucuguuguguagcaccaag

SEQ ID NO: 4350 - RNA, 19 nt, Artificial Sequence
  Description of Artificial Sequence: Synthetic oligonucleotide
gucuguuguguagcaccaa

SEQ ID NO: 4351 - RNA, 19 nt, Artificial Sequence
  Description of Artificial Sequence: Synthetic oligonucleotide
ggucuguuguguagcacca

SEQ ID NO: 4352 - RNA, 19 nt, Artificial Sequence
  Description of Artificial Sequence: Synthetic oligonucleotide
gggucuguuguguagcacc

SEQ ID NO: 4353 - RNA, 19 nt, Artificial Sequence
  Description of Artificial Sequence: Synthetic oligonucleotide
agggucuguuguguagcac

SEQ ID NO: 4354 - RNA, 19 nt, Artificial Sequence
  Description of Artificial Sequence: Synthetic oligonucleotide
cagggucuguuguguagca

SEQ ID NO: 4355 - RNA, 19 nt, Artificial Sequence
  Description of Artificial Sequence: Synthetic oligonucleotide
gcagggucuguuguguagc

SEQ ID NO: 4356 - RNA, 19 nt, Artificial Sequence
  Description of Artificial Sequence: Synthetic oligonucleotide
agcagggucuguuguguag

SEQ ID NO: 4357 - RNA, 19 nt, Artificial Sequence
  Description of Artificial Sequence: Synthetic oligonucleotide
cagcagggucuguugugua

SEQ ID NO: 4358 - RNA, 19 nt, Artificial Sequence
  Description of Artificial Sequence: Synthetic oligonucleotide
acagcagggucuguugugu

SEQ ID NO: 4359 - RNA, 19 nt, Artificial Sequence
  Description of Artificial Sequence: Synthetic oligonucleotide
cacagcagggucuguugug

SEQ ID NO: 4360 - RNA, 19 nt, Artificial Sequence
  Description of Artificial Sequence: Synthetic oligonucleotide
gcacagcagggucuguugu

SEQ ID NO: 4361 - RNA, 19 nt, Artificial Sequence
  Description of Artificial Sequence: Synthetic oligonucleotide
cgcacagcagggucuguug

SEQ ID NO: 4362 - RNA, 19 nt, Artificial Sequence
  Description of Artificial Sequence: Synthetic oligonucleotide
gcgcacagcagggucuguu

SEQ ID NO: 4363 - RNA, 19 nt, Artificial Sequence
  Description of Artificial Sequence: Synthetic oligonucleotide
agcgcacagcagggucugu

SEQ ID NO: 4364 - RNA, 19 nt, Artificial Sequence
  Description of Artificial Sequence: Synthetic oligonucleotide
aagcgcacagcagggucug

SEQ ID NO: 4365 - RNA, 19 nt, Artificial Sequence
  Description of Artificial Sequence: Synthetic oligonucleotide
gaagcgcacagcagggucu

SEQ ID NO: 4366 - RNA, 19 nt, Artificial Sequence
  Description of Artificial Sequence: Synthetic oligonucleotide
ggaagcgcacagcaggguc

SEQ ID NO: 4367 - RNA, 19 nt, Artificial Sequence
  Description of Artificial Sequence: Synthetic oligonucleotide
uggaagcgcacagcagggu

SEQ ID NO: 4368 - RNA, 19 nt, Artificial Sequence
  Description of Artificial Sequence: Synthetic oligonucleotide
cuggaagcgcacagcaggg

SEQ ID NO: 4369 - RNA, 19 nt, Artificial Sequence
  Description of Artificial Sequence: Synthetic oligonucleotide
ucuggaagcgcacagcagg

SEQ ID NO: 4370 - RNA, 19 nt, Artificial Sequence
  Description of Artificial Sequence: Synthetic oligonucleotide
cucuggaagcgcacagcag

SEQ ID NO: 4371 - RNA, 19 nt, Artificial Sequence
  Description of Artificial Sequence: Synthetic oligonucleotide
gcucuggaagcgcacagca

SEQ ID NO: 4372 - RNA, 19 nt, Artificial Sequence
  Description of Artificial Sequence: Synthetic oligonucleotide
agcucuggaagcgcacagc

SEQ ID NO: 4373 - RNA, 19 nt, Artificial Sequence
  Description of Artificial Sequence: Synthetic oligonucleotide
cagcucuggaagcgcacag

SEQ ID NO: 4374 - RNA, 19 nt, Artificial Sequence
  Description of Artificial Sequence: Synthetic oligonucleotide
gcagcucuggaagcgcaca

SEQ ID NO: 4375 - RNA, 19 nt, Artificial Sequence
  Description of Artificial Sequence: Synthetic oligonucleotide
cgcagcucuggaagcgcac

SEQ ID NO: 4376 - RNA, 19 nt, Artificial Sequence
  Description of Artificial Sequence: Synthetic oligonucleotide
ccgcagcucuggaagcgca

SEQ ID NO: 4377 - RNA, 19 nt, Artificial Sequence
  Description of Artificial Sequence: Synthetic oligonucleotide
gccgcagcucuggaagcgc

SEQ ID NO: 4378 - RNA, 19 nt, Artificial Sequence
  Description of Artificial Sequence: Synthetic oligonucleotide
ugccgcagcucuggaagcg

SEQ ID NO: 4379 - RNA, 19 nt, Artificial Sequence
  Description of Artificial Sequence: Synthetic oligonucleotide
augccgcagcucuggaagc

SEQ ID NO: 4380 - RNA, 19 nt, Artificial Sequence
  Description of Artificial Sequence: Synthetic oligonucleotide
gaugccgcagcucuggaag

SEQ ID NO: 4381 - RNA, 19 nt, Artificial Sequence
  Description of Artificial Sequence: Synthetic oligonucleotide
ugaugccgcagcucuggaa

SEQ ID NO: 4382 - RNA, 19 nt, Artificial Sequence
  Description of Artificial Sequence: Synthetic oligonucleotide
uugaugccgcagcucugga

SEQ ID NO: 4383 - RNA, 19 nt, Artificial Sequence
  Description of Artificial Sequence: Synthetic oligonucleotide
uuugaugccgcagcucugg

SEQ ID NO: 4384 - RNA, 19 nt, Artificial Sequence
  Description of Artificial Sequence: Synthetic oligonucleotide
auuugaugccgcagcucug

SEQ ID NO: 4385 - RNA, 19 nt, Artificial Sequence
  Description of Artificial Sequence: Synthetic oligonucleotide
gauuugaugccgcagcucu

SEQ ID NO: 4386 - RNA, 19 nt, Artificial Sequence
  Description of Artificial Sequence: Synthetic oligonucleotide
ggauuugaugccgcagcuc

SEQ ID NO: 4387 - RNA, 19 nt, Artificial Sequence
  Description of Artificial Sequence: Synthetic oligonucleotide
aggauuugaugccgcagcu

SEQ ID NO: 4388 - RNA, 19 nt, Artificial Sequence
  Description of Artificial Sequence: Synthetic oligonucleotide
caggauuugaugccgcagc

SEQ ID NO: 4389 - RNA, 19 nt, Artificial Sequence
  Description of Artificial Sequence: Synthetic oligonucleotide
gcaggauuugaugccgcag

SEQ ID NO: 4390 - RNA, 19 nt, Artificial Sequence
  Description of Artificial Sequence: Synthetic oligonucleotide
ggcaggauuugaugccgca

SEQ ID NO: 4391 - RNA, 19 nt, Artificial Sequence
  Description of Artificial Sequence: Synthetic oligonucleotide
cggcaggauuugaugccgc

SEQ ID NO: 4392 - RNA, 19 nt, Artificial Sequence
  Description of Artificial Sequence: Synthetic oligonucleotide
ccggcaggauuugaugccg

SEQ ID NO: 4393 - RNA, 19 nt, Artificial Sequence
  Description of Artificial Sequence: Synthetic oligonucleotide
cccggcaggauuugaugcc

SEQ ID NO: 4394 - RNA, 19 nt, Artificial Sequence
  Description of Artificial Sequence: Synthetic oligonucleotide
ucccggcaggauuugaugc

SEQ ID NO: 4395 - RNA, 19 nt, Artificial Sequence
  Description of Artificial Sequence: Synthetic oligonucleotide
cucccggcaggauuugaug

SEQ ID NO: 4396 - RNA, 19 nt, Artificial Sequence
  Description of Artificial Sequence: Synthetic oligonucleotide
ccucccggcaggauuugau

SEQ ID NO: 4397 - RNA, 19 nt, Artificial Sequence
  Description of Artificial Sequence: Synthetic oligonucleotide
gccucccggcaggauuuga

SEQ ID NO: 4398 - RNA, 19 nt, Artificial Sequence
  Description of Artificial Sequence: Synthetic oligonucleotide
ggccucccggcaggauuug

SEQ ID NO: 4399 - RNA, 19 nt, Artificial Sequence
  Description of Artificial Sequence: Synthetic oligonucleotide
cggccucccggcaggauuu

SEQ ID NO: 4400 - RNA, 19 nt, Artificial Sequence
  Description of Artificial Sequence: Synthetic oligonucleotide
gcggccucccggcaggauu

SEQ ID NO: 4401 - RNA, 19 nt, Artificial Sequence
  Description of Artificial Sequence: Synthetic oligonucleotide
cgcggccucccggcaggau

SEQ ID NO: 4402 - RNA, 19 nt, Artificial Sequence
  Description of Artificial Sequence: Synthetic oligonucleotide
acgcggccucccggcagga

SEQ ID NO: 4403 - RNA, 19 nt, Artificial Sequence
  Description of Artificial Sequence: Synthetic oligonucleotide
cacgcggccucccggcagg

SEQ ID NO: 4404 - RNA, 19 nt, Artificial Sequence
  Description of Artificial Sequence: Synthetic oligonucleotide
acacgcggccucccggcag

SEQ ID NO: 4405 - RNA, 19 nt, Artificial Sequence
  Description of Artificial Sequence: Synthetic oligonucleotide
cacacgcggccucccggca

SEQ ID NO: 4406 - RNA, 19 nt, Artificial Sequence
  Description of Artificial Sequence: Synthetic oligonucleotide
acacacgcggccucccggc

SEQ ID NO: 4407 - RNA, 19 nt, Artificial Sequence
  Description of Artificial Sequence: Synthetic oligonucleotide
gacacacgcggccucccgg

SEQ ID NO: 4408 - RNA, 19 nt, Artificial Sequence
  Description of Artificial Sequence: Synthetic oligonucleotide
agacacacgcggccucccg

SEQ ID NO: 4409 - RNA, 19 nt, Artificial Sequence
  Description of Artificial Sequence: Synthetic oligonucleotide
cagacacacgcggccuccc

SEQ ID NO: 4410 - RNA, 19 nt, Artificial Sequence
  Description of Artificial Sequence: Synthetic oligonucleotide
ccagacacacgcggccucc

SEQ ID NO: 4411 - RNA, 19 nt, Artificial Sequence
  Description of Artificial Sequence: Synthetic oligonucleotide
accagacacacgcggccuc

SEQ ID NO: 4412 - RNA, 19 nt, Artificial Sequence
  Description of Artificial Sequence: Synthetic oligonucleotide
caccagacacacgcggccu

SEQ ID NO: 4413 - RNA, 19 nt, Artificial Sequence
  Description of Artificial Sequence: Synthetic oligonucleotide
gcaccagacacacgcggcc

SEQ ID NO: 4414 - RNA, 19 nt, Artificial Sequence
  Description of Artificial Sequence: Synthetic oligonucleotide
ugcaccagacacacgcggc

SEQ ID NO: 4415 - RNA, 19 nt, Artificial Sequence
  Description of Artificial Sequence: Synthetic oligonucleotide
uugcaccagacacacgcgg

SEQ ID NO: 4416 - RNA, 19 nt, Artificial Sequence
  Description of Artificial Sequence: Synthetic oligonucleotide
auugcaccagacacacgcg

SEQ ID NO: 4417 - RNA, 19 nt, Artificial Sequence
  Description of Artificial Sequence: Synthetic oligonucleotide
cauugcaccagacacacgc

SEQ ID NO: 4418 - RNA, 19 nt, Artificial Sequence
  Description of Artificial Sequence: Synthetic oligonucleotide
ccauugcaccagacacacg

SEQ ID NO: 4419 - RNA, 19 nt, Artificial Sequence
  Description of Artificial Sequence: Synthetic oligonucleotide
gccauugcaccagacacac

SEQ ID NO: 4420 - RNA, 19 nt, Artificial Sequence
  Description of Artificial Sequence: Synthetic oligonucleotide
cgccauugcaccagacaca

SEQ ID NO: 4421 - RNA, 19 nt, Artificial Sequence
  Description of Artificial Sequence: Synthetic oligonucleotide
ucgccauugcaccagacac

SEQ ID NO: 4422 - RNA, 19 nt, Artificial Sequence
  Description of Artificial Sequence: Synthetic oligonucleotide
cucgccauugcaccagaca

SEQ ID NO: 4423 - RNA, 19 nt, Artificial Sequence
  Description of Artificial Sequence: Synthetic oligonucleotide
ccucgccauugcaccagac

SEQ ID NO: 4424 - RNA, 19 nt, Artificial Sequence
  Description of Artificial Sequence: Synthetic oligonucleotide
uccucgccauugcaccaga

SEQ ID NO: 4425 - RNA, 19 nt, Artificial Sequence
  Description of Artificial Sequence: Synthetic oligonucleotide
uuccucgccauugcaccag

SEQ ID NO: 4426 - RNA, 19 nt, Artificial Sequence
  Description of Artificial Sequence: Synthetic oligonucleotide
auuccucgccauugcacca

SEQ ID NO: 4427 - RNA, 19 nt, Artificial Sequence
  Description of Artificial Sequence: Synthetic oligonucleotide
uauuccucgccauugcacc

SEQ ID NO: 4428 - RNA, 19 nt, Artificial Sequence
  Description of Artificial Sequence: Synthetic oligonucleotide
guauuccucgccauugcac

SEQ ID NO: 4429 - RNA, 19 nt, Artificial Sequence
  Description of Artificial Sequence: Synthetic oligonucleotide
gguauuccucgccauugca

SEQ ID NO: 4430 - RNA, 19 nt, Artificial Sequence
  Description of Artificial Sequence: Synthetic oligonucleotide
cgguauuccucgccauugc

SEQ ID NO: 4431 - RNA, 19 nt, Artificial Sequence
  Description of Artificial Sequence: Synthetic oligonucleotide
gcgguauuccucgccauug

SEQ ID NO: 4432 - RNA, 19 nt, Artificial Sequence
  Description of Artificial Sequence: Synthetic oligonucleotide
cgcgguauuccucgccauu

SEQ ID NO: 4433 - RNA, 19 nt, Artificial Sequence
  Description of Artificial Sequence: Synthetic oligonucleotide
ccgcgguauuccucgccau

SEQ ID NO: 4434 - RNA, 19 nt, Artificial Sequence
  Description of Artificial Sequence: Synthetic oligonucleotide
gccgcgguauuccucgcca

SEQ ID NO: 4435 - RNA, 19 nt, Artificial Sequence
  Description of Artificial Sequence: Synthetic oligonucleotide
cgccgcgguauuccucgcc

SEQ ID NO: 4436 - RNA, 19 nt, Artificial Sequence
  Description of Artificial Sequence: Synthetic oligonucleotide
gcgccgcgguauuccucgc

SEQ ID NO: 4437 - RNA, 19 nt, Artificial Sequence
  Description of Artificial Sequence: Synthetic oligonucleotide
cgcgccgcgguauuccucg

SEQ ID NO: 4438 - RNA, 19 nt, Artificial Sequence
  Description of Artificial Sequence: Synthetic oligonucleotide
ccgcgccgcgguauuccuc

SEQ ID NO: 4439 - RNA, 19 nt, Artificial Sequence
  Description of Artificial Sequence: Synthetic oligonucleotide
accgcgccgcgguauuccu

SEQ ID NO: 4440 - RNA, 19 nt, Artificial Sequence
  Description of Artificial Sequence: Synthetic oligonucleotide
uaccgcgccgcgguauucc

SEQ ID NO: 4441 - RNA, 19 nt, Artificial Sequence
  Description of Artificial Sequence: Synthetic oligonucleotide
cuaccgcgccgcgguauuc

SEQ ID NO: 4442 - RNA, 19 nt, Artificial Sequence
  Description of Artificial Sequence: Synthetic oligonucleotide
ucuaccgcgccgcgguauu

SEQ ID NO: 4443 - RNA, 19 nt, Artificial Sequence
  Description of Artificial Sequence: Synthetic oligonucleotide
gucuaccgcgccgcgguau

SEQ ID NO: 4444 - RNA, 19 nt, Artificial Sequence
  Description of Artificial Sequence: Synthetic oligonucleotide
ggucuaccgcgccgcggua

SEQ ID NO: 4445 - RNA, 19 nt, Artificial Sequence
  Description of Artificial Sequence: Synthetic oligonucleotide
cggucuaccgcgccgcggu

SEQ ID NO: 4446 - RNA, 19 nt, Artificial Sequence
  Description of Artificial Sequence: Synthetic oligonucleotide
gcggucuaccgcgccgcgg

SEQ ID NO: 4447 - RNA, 19 nt, Artificial Sequence
  Description of Artificial Sequence: Synthetic oligonucleotide
ugcggucuaccgcgccgcg

SEQ ID NO: 4448 - RNA, 19 nt, Artificial Sequence
  Description of Artificial Sequence: Synthetic oligonucleotide
gugcggucuaccgcgccgc

SEQ ID NO: 4449 - RNA, 19 nt, Artificial Sequence
  Description of Artificial Sequence: Synthetic oligonucleotide
cgugcggucuaccgcgccg

SEQ ID NO: 4450 - RNA, 19 nt, Artificial Sequence
  Description of Artificial Sequence: Synthetic oligonucleotide
ccgugcggucuaccgcgcc

SEQ ID NO: 4451 - RNA, 19 nt, Artificial Sequence
  Description of Artificial Sequence: Synthetic oligonucleotide
uccgugcggucuaccgcgc

SEQ ID NO: 4452 - RNA, 19 nt, Artificial Sequence
  Description of Artificial Sequence: Synthetic oligonucleotide
cuccgugcggucuaccgcg

SEQ ID NO: 4453 - RNA, 19 nt, Artificial Sequence
  Description of Artificial Sequence: Synthetic oligonucleotide
acuccgugcggucuaccgc

SEQ ID NO: 4454 - RNA, 19 nt, Artificial Sequence
  Description of Artificial Sequence: Synthetic oligonucleotide
gacuccgugcggucuaccg

SEQ ID NO: 4455 - RNA, 19 nt, Artificial Sequence
  Description of Artificial Sequence: Synthetic oligonucleotide
ugacuccgugcggucuacc

SEQ ID NO: 4456 - RNA, 19 nt, Artificial Sequence
  Description of Artificial Sequence: Synthetic oligonucleotide
cugacuccgugcggucuac

SEQ ID NO: 4457 - RNA, 19 nt, Artificial Sequence
  Description of Artificial Sequence: Synthetic oligonucleotide
ccugacuccgugcggucua

SEQ ID NO: 4458 - RNA, 19 nt, Artificial Sequence
  Description of Artificial Sequence: Synthetic oligonucleotide
cccugacuccgugcggucu

SEQ ID NO: 4459 - RNA, 19 nt, Artificial Sequence
  Description of Artificial Sequence: Synthetic oligonucleotide
gcccugacuccgugcgguc

SEQ ID NO: 4460 - RNA, 19 nt, Artificial Sequence
  Description of Artificial Sequence: Synthetic oligonucleotide
cgcccugacuccgugcggu

SEQ ID NO: 4461 - RNA, 19 nt, Artificial Sequence
  Description of Artificial Sequence: Synthetic oligonucleotide
gcgcccugacuccgugcgg

SEQ ID NO: 4462 - RNA, 19 nt, Artificial Sequence
  Description of Artificial Sequence: Synthetic oligonucleotide
cgcgcccugacuccgugcg

SEQ ID NO: 4463 - RNA, 19 nt, Artificial Sequence
  Description of Artificial Sequence: Synthetic oligonucleotide
ucgcgcccugacuccgugc

SEQ ID NO: 4464 - RNA, 19 nt, Artificial Sequence
  Description of Artificial Sequence: Synthetic oligonucleotide
cucgcgcccugacuccgug

SEQ ID NO: 4465 - RNA, 19 nt, Artificial Sequence
  Description of Artificial Sequence: Synthetic oligonucleotide
acucgcgcccugacuccgu

SEQ ID NO: 4466 - RNA, 19 nt, Artificial Sequence
  Description of Artificial Sequence: Synthetic oligonucleotide
cacucgcgcccugacuccg

SEQ ID NO: 4467 - RNA, 19 nt, Artificial Sequence
  Description of Artificial Sequence: Synthetic oligonucleotide
gcacucgcgcccugacucc

SEQ ID NO: 4468 - RNA, 19 nt, Artificial Sequence
  Description of Artificial Sequence: Synthetic oligonucleotide
ggcacucgcgcccugacuc

SEQ ID NO: 4469 - RNA, 19 nt, Artificial Sequence
  Description of Artificial Sequence: Synthetic oligonucleotide
uggcacucgcgcccugacu

SEQ ID NO: 4470 - RNA, 19 nt, Artificial Sequence
  Description of Artificial Sequence: Synthetic oligonucleotide
cuggcacucgcgcccugac

SEQ ID NO: 4471 - RNA, 19 nt, Artificial Sequence
  Description of Artificial Sequence: Synthetic oligonucleotide
gcuggcacucgcgcccuga

SEQ ID NO: 4472 - RNA, 19 nt, Artificial Sequence
  Description of Artificial Sequence: Synthetic oligonucleotide
cgcuggcacucgcgcccug

SEQ ID NO: 4473 - RNA, 19 nt, Artificial Sequence
  Description of Artificial Sequence: Synthetic oligonucleotide
gcgcuggcacucgcgcccu

SEQ ID NO: 4474 - RNA, 19 nt, Artificial Sequence
  Description of Artificial Sequence: Synthetic oligonucleotide
agcgcuggcacucgcgccc

SEQ ID NO: 4475 - RNA, 19 nt, Artificial Sequence
  Description of Artificial Sequence: Synthetic oligonucleotide
cagcgcuggcacucgcgcc

SEQ ID NO: 4476 - RNA, 19 nt, Artificial Sequence
  Description of Artificial Sequence: Synthetic oligonucleotide
ccagcgcuggcacucgcgc

SEQ ID NO: 4477 - RNA, 19 nt, Artificial Sequence
  Description of Artificial Sequence: Synthetic oligonucleotide
cccagcgcuggcacucgcg

SEQ ID NO: 4478 - RNA, 19 nt, Artificial Sequence
  Description of Artificial Sequence: Synthetic oligonucleotide
ucccagcgcuggcacucgc

SEQ ID NO: 4479 - RNA, 19 nt, Artificial Sequence
  Description of Artificial Sequence: Synthetic oligonucleotide
aucccagcgcuggcacucg

SEQ ID NO: 4480 - RNA, 19 nt, Artificial Sequence
  Description of Artificial Sequence: Synthetic oligonucleotide
gaucccagcgcuggcacuc

SEQ ID NO: 4481 - RNA, 19 nt, Artificial Sequence
  Description of Artificial Sequence: Synthetic oligonucleotide
agaucccagcgcuggcacu

SEQ ID NO: 4482 - RNA, 19 nt, Artificial Sequence
  Description of Artificial Sequence: Synthetic oligonucleotide
aagaucccagcgcuggcac

SEQ ID NO: 4483 - RNA, 19 nt, Artificial Sequence
  Description of Artificial Sequence: Synthetic oligonucleotide
gaagaucccagcgcuggca

SEQ ID NO: 4484 - RNA, 19 nt, Artificial Sequence
  Description of Artificial Sequence: Synthetic oligonucleotide
ugaagaucccagcgcuggc

SEQ ID NO: 4485 - RNA, 19 nt, Artificial Sequence
  Description of Artificial Sequence: Synthetic oligonucleotide
cugaagaucccagcgcugg

SEQ ID NO: 4486 - RNA, 19 nt, Artificial Sequence
  Description of Artificial Sequence: Synthetic oligonucleotide
gcugaagaucccagcgcug

SEQ ID NO: 4487 - RNA, 19 nt, Artificial Sequence
  Description of Artificial Sequence: Synthetic oligonucleotide
ugcugaagaucccagcgcu

SEQ ID NO: 4488 - RNA, 19 nt, Artificial Sequence
  Description of Artificial Sequence: Synthetic oligonucleotide
gugcugaagaucccagcgc

SEQ ID NO: 4489 - RNA, 19 nt, Artificial Sequence
  Description of Artificial Sequence: Synthetic oligonucleotide
ggugcugaagaucccagcg

SEQ ID NO: 4490 - RNA, 19 nt, Artificial Sequence
  Description of Artificial Sequence: Synthetic oligonucleotide
gggugcugaagaucccagc

SEQ ID NO: 4491 - RNA, 19 nt, Artificial Sequence
  Description of Artificial Sequence: Synthetic oligonucleotide
cgggugcugaagaucccag

SEQ ID NO: 4492 - RNA, 19 nt, Artificial Sequence
  Description of Artificial Sequence: Synthetic oligonucleotide
gcgggugcugaagauccca

SEQ ID NO: 4493 - RNA, 19 nt, Artificial Sequence
  Description of Artificial Sequence: Synthetic oligonucleotide
ugcgggugcugaagauccc

SEQ ID NO: 4494 - RNA, 19 nt, Artificial Sequence
  Description of Artificial Sequence: Synthetic oligonucleotide
gugcgggugcugaagaucc

SEQ ID NO: 4495 - RNA, 19 nt, Artificial Sequence
  Description of Artificial Sequence: Synthetic oligonucleotide
ggugcgggugcugaagauc

SEQ ID NO: 4496 - RNA, 19 nt, Artificial Sequence
  Description of Artificial Sequence: Synthetic oligonucleotide
uggugcgggugcugaagau

SEQ ID NO: 4497 - RNA, 19 nt, Artificial Sequence
  Description of Artificial Sequence: Synthetic oligonucleotide
cuggugcgggugcugaaga

SEQ ID NO: 4498 - RNA, 19 nt, Artificial Sequence
  Description of Artificial Sequence: Synthetic oligonucleotide
gcuggugcgggugcugaag

SEQ ID NO: 4499 - RNA, 19 nt, Artificial Sequence
  Description of Artificial Sequence: Synthetic oligonucleotide
ugcuggugcgggugcugaa

SEQ ID NO: 4500 - RNA, 19 nt, Artificial Sequence
  Description of Artificial Sequence: Synthetic oligonucleotide
gugcuggugcgggugcuga

SEQ ID NO: 4501 - RNA, 19 nt, Artificial Sequence
  Description of Artificial Sequence: Synthetic oligonucleotide
ggugcuggugcgggugcug

SEQ ID NO: 4502 - RNA, 19 nt, Artificial Sequence
  Description of Artificial Sequence: Synthetic oligonucleotide
gggugcuggugcgggugcu

SEQ ID NO: 4503 - RNA, 19 nt, Artificial Sequence
  Description of Artificial Sequence: Synthetic oligonucleotide
ggggugcuggugcgggugc

SEQ ID NO: 4504 - RNA, 19 nt, Artificial Sequence
  Description of Artificial Sequence: Synthetic oligonucleotide
aggggugcuggugcgggug

SEQ ID NO: 4505 - RNA, 19 nt, Artificial Sequence
  Description of Artificial Sequence: Synthetic oligonucleotide
aaggggugcuggugcgggu

SEQ ID NO: 4506 - RNA, 19 nt, Artificial Sequence
  Description of Artificial Sequence: Synthetic oligonucleotide
gaaggggugcuggugcggg

SEQ ID NO: 4507 - RNA, 19 nt, Artificial Sequence
  Description of Artificial Sequence: Synthetic oligonucleotide
cgaaggggugcuggugcgg

SEQ ID NO: 4508 - RNA, 19 nt, Artificial Sequence
  Description of Artificial Sequence: Synthetic oligonucleotide
ucgaaggggugcuggugcg

SEQ ID NO: 4509 - RNA, 19 nt, Artificial Sequence
  Description of Artificial Sequence: Synthetic oligonucleotide
cucgaaggggugcuggugc

SEQ ID NO: 4510 - RNA, 19 nt, Artificial Sequence
  Description of Artificial Sequence: Synthetic oligonucleotide
gcucgaaggggugcuggug

SEQ ID NO: 4511 - RNA, 19 nt, Artificial Sequence
  Description of Artificial Sequence: Synthetic oligonucleotide
ggcucgaaggggugcuggu

SEQ ID NO: 4512 - RNA, 19 nt, Artificial Sequence
  Description of Artificial Sequence: Synthetic oligonucleotide
cggcucgaaggggugcugg

SEQ ID NO: 4513 - RNA, 19 nt, Artificial Sequence
  Description of Artificial Sequence: Synthetic oligonucleotide
ccggcucgaaggggugcug

SEQ ID NO: 4514 - RNA, 19 nt, Artificial Sequence
  Description of Artificial Sequence: Synthetic oligonucleotide
cccggcucgaaggggugcu

SEQ ID NO: 4515 - RNA, 19 nt, Artificial Sequence
  Description of Artificial Sequence: Synthetic oligonucleotide
gcccggcucgaaggggugc

SEQ ID NO: 4516 - RNA, 19 nt, Artificial Sequence
  Description of Artificial Sequence: Synthetic oligonucleotide
ugcccggcucgaaggggug

SEQ ID NO: 4517 - RNA, 19 nt, Artificial Sequence
  Description of Artificial Sequence: Synthetic oligonucleotide
uugcccggcucgaaggggu

SEQ ID NO: 4518 - RNA, 19 nt, Artificial Sequence
  Description of Artificial Sequence: Synthetic oligonucleotide
cuugcccggcucgaagggg

SEQ ID NO: 4519 - RNA, 19 nt, Artificial Sequence
  Description of Artificial Sequence: Synthetic oligonucleotide
acuugcccggcucgaaggg

SEQ ID NO: 4520 - RNA, 19 nt, Artificial Sequence
  Description of Artificial Sequence: Synthetic oligonucleotide
aacuugcccggcucgaagg

SEQ ID NO: 4521 - RNA, 19 nt, Artificial Sequence
  Description of Artificial Sequence: Synthetic oligonucleotide
gaacuugcccggcucgaag

SEQ ID NO: 4522 - RNA, 19 nt, Artificial Sequence
  Description of Artificial Sequence: Synthetic oligonucleotide
ggaacuugcccggcucgaa

SEQ ID NO: 4523 - RNA, 19 nt, Artificial Sequence
  Description of Artificial Sequence: Synthetic oligonucleotide
aggaacuugcccggcucga

SEQ ID NO: 4524 - RNA, 19 nt, Artificial Sequence
  Description of Artificial Sequence: Synthetic oligonucleotide
gaggaacuugcccggcucg

SEQ ID NO: 4525 - RNA, 19 nt, Artificial Sequence
  Description of Artificial Sequence: Synthetic oligonucleotide
cgaggaacuugcccggcuc

SEQ ID NO: 4526 - RNA, 19 nt, Artificial Sequence
  Description of Artificial Sequence: Synthetic oligonucleotide
ucgaggaacuugcccggcu

SEQ ID NO: 4527 - RNA, 19 nt, Artificial Sequence
  Description of Artificial Sequence: Synthetic oligonucleotide
gucgaggaacuugcccggc

SEQ ID NO: 4528 - RNA, 19 nt, Artificial Sequence
  Description of Artificial Sequence: Synthetic oligonucleotide
ggucgaggaacuugcccgg

SEQ ID NO: 4529 - RNA, 19 nt, Artificial Sequence
  Description of Artificial Sequence: Synthetic oligonucleotide
uggucgaggaacuugcccg

SEQ ID NO: 4530 - RNA, 19 nt, Artificial Sequence
  Description of Artificial Sequence: Synthetic oligonucleotide
uuggucgaggaacuugccc

SEQ ID NO: 4531 - RNA, 19 nt, Artificial Sequence
  Description of Artificial Sequence: Synthetic oligonucleotide
cuuggucgaggaacuugcc

SEQ ID NO: 4532 - RNA, 19 nt, Artificial Sequence
  Description of Artificial Sequence: Synthetic oligonucleotide
ccuuggucgaggaacuugc

SEQ ID NO: 4533 - RNA, 19 nt, Artificial Sequence
  Description of Artificial Sequence: Synthetic oligonucleotide
accuuggucgaggaacuug

SEQ ID NO: 4534 - RNA, 19 nt, Artificial Sequence
  Description of Artificial Sequence: Synthetic oligonucleotide
gaccuuggucgaggaacuu

SEQ ID NO: 4535 - RNA, 19 nt, Artificial Sequence
  Description of Artificial Sequence: Synthetic oligonucleotide
agaccuuggucgaggaacu

SEQ ID NO: 4536 - RNA, 19 nt, Artificial Sequence
  Description of Artificial Sequence: Synthetic oligonucleotide
cagaccuuggucgaggaac

SEQ ID NO: 4537 - RNA, 19 nt, Artificial Sequence
  Description of Artificial Sequence: Synthetic oligonucleotide
ccagaccuuggucgaggaa

SEQ ID NO: 4538 - RNA, 19 nt, Artificial Sequence
  Description of Artificial Sequence: Synthetic oligonucleotide
uccagaccuuggucgagga

SEQ ID NO: 4539 - RNA, 19 nt, Artificial Sequence
  Description of Artificial Sequence: Synthetic oligonucleotide
guccagaccuuggucgagg

SEQ ID NO: 4540 - RNA, 19 nt, Artificial Sequence
  Description of Artificial Sequence: Synthetic oligonucleotide
cguccagaccuuggucgag

SEQ ID NO: 4541 - RNA, 19 nt, Artificial Sequence
  Description of Artificial Sequence: Synthetic oligonucleotide
ucguccagaccuuggucga

SEQ ID NO: 4542 - RNA, 19 nt, Artificial Sequence
  Description of Artificial Sequence: Synthetic oligonucleotide
gucguccagaccuuggucg

SEQ ID NO: 4543 - RNA, 19 nt, Artificial Sequence
  Description of Artificial Sequence: Synthetic oligonucleotide
ugucguccagaccuugguc

SEQ ID NO: 4544 - RNA, 19 nt, Artificial Sequence
  Description of Artificial Sequence: Synthetic oligonucleotide
uugucguccagaccuuggu

SEQ ID NO: 4545 - RNA, 19 nt, Artificial Sequence
  Description of Artificial Sequence: Synthetic oligonucleotide
guugucguccagaccuugg

SEQ ID NO: 4546 - RNA, 19 nt, Artificial Sequence
  Description of Artificial Sequence: Synthetic oligonucleotide
aguugucguccagaccuug

SEQ ID NO: 4547 - RNA, 19 nt, Artificial Sequence
  Description of Artificial Sequence: Synthetic oligonucleotide
uaguugucguccagaccuu

SEQ ID NO: 4548 - RNA, 19 nt, Artificial Sequence
  Description of Artificial Sequence: Synthetic oligonucleotide
auaguugucguccagaccu

SEQ ID NO: 4549 - RNA, 19 nt, Artificial Sequence
  Description of Artificial Sequence: Synthetic oligonucleotide
aauaguugucguccagacc

SEQ ID NO: 4550 - RNA, 19 nt, Artificial Sequence
  Description of Artificial Sequence: Synthetic oligonucleotide
caauaguugucguccagac

SEQ ID NO: 4551 - RNA, 19 nt, Artificial Sequence
  Description of Artificial Sequence: Synthetic oligonucleotide
gcaauaguugucguccaga

SEQ ID NO: 4552 - RNA, 19 nt, Artificial Sequence
  Description of Artificial Sequence: Synthetic oligonucleotide
ggcaauaguugucguccag

SEQ ID NO: 4553 - RNA, 19 nt, Artificial Sequence
  Description of Artificial Sequence: Synthetic oligonucleotide
cggcaauaguugucgucca

SEQ ID NO: 4554 - RNA, 19 nt, Artificial Sequence
  Description of Artificial Sequence: Synthetic oligonucleotide
ccggcaauaguugucgucc

SEQ ID NO: 4555 - RNA, 19 nt, Artificial Sequence
  Description of Artificial Sequence: Synthetic oligonucleotide
uccggcaauaguugucguc

SEQ ID NO: 4556 - RNA, 19 nt, Artificial Sequence
  Description of Artificial Sequence: Synthetic oligonucleotide
uuccggcaauaguugucgu

SEQ ID NO: 4557 - RNA, 19 nt, Artificial Sequence
  Description of Artificial Sequence: Synthetic oligonucleotide
auuccggcaauaguugucg

SEQ ID NO: 4558 - RNA, 19 nt, Artificial Sequence
  Description of Artificial Sequence: Synthetic oligonucleotide
gauuccggcaauaguuguc

SEQ ID NO: 4559 - RNA, 19 nt, Artificial Sequence
  Description of Artificial Sequence: Synthetic oligonucleotide
ggauuccggcaauaguugu

SEQ ID NO: 4560 - RNA, 19 nt, Artificial Sequence
  Description of Artificial Sequence: Synthetic oligonucleotide
aggauuccggcaauaguug

SEQ ID NO: 4561 - RNA, 19 nt, Artificial Sequence
  Description of Artificial Sequence: Synthetic oligonucleotide
caggauuccggcaauaguu

SEQ ID NO: 4562 - RNA, 19 nt, Artificial Sequence
  Description of Artificial Sequence: Synthetic oligonucleotide
ucaggauuccggcaauagu

SEQ ID NO: 4563 - RNA, 19 nt, Artificial Sequence
  Description of Artificial Sequence: Synthetic oligonucleotide
gucaggauuccggcaauag

SEQ ID NO: 4564 - RNA, 19 nt, Artificial Sequence
  Description of Artificial Sequence: Synthetic oligonucleotide
cgucaggauuccggcaaua

SEQ ID NO: 4565 - RNA, 19 nt, Artificial Sequence
  Description of Artificial Sequence: Synthetic oligonucleotide
ccgucaggauuccggcaau

SEQ ID NO: 4566 - RNA, 19 nt, Artificial Sequence
  Description of Artificial Sequence: Synthetic oligonucleotide
gccgucaggauuccggcaa

SEQ ID NO: 4567 - RNA, 19 nt, Artificial Sequence
  Description of Artificial Sequence: Synthetic oligonucleotide
agccgucaggauuccggca

SEQ ID NO: 4568 - RNA, 19 nt, Artificial Sequence
  Description of Artificial Sequence: Synthetic oligonucleotide
gagccgucaggauuccggc

SEQ ID NO: 4569 - RNA, 19 nt, Artificial Sequence
  Description of Artificial Sequence: Synthetic oligonucleotide
ggagccgucaggauuccgg

SEQ ID NO: 4570 - RNA, 19 nt, Artificial Sequence
  Description of Artificial Sequence: Synthetic oligonucleotide
cggagccgucaggauuccg

SEQ ID NO: 4571 - RNA, 19 nt, Artificial Sequence
  Description of Artificial Sequence: Synthetic oligonucleotide
ucggagccgucaggauucc

SEQ ID NO: 4572 - RNA, 19 nt, Artificial Sequence
  Description of Artificial Sequence: Synthetic oligonucleotide
cucggagccgucaggauuc

SEQ ID NO: 4573 - RNA, 19 nt, Artificial Sequence
  Description of Artificial Sequence: Synthetic oligonucleotide
gcucggagccgucaggauu

SEQ ID NO: 4574 - RNA, 19 nt, Artificial Sequence
  Description of Artificial Sequence: Synthetic oligonucleotide
cgcucggagccgucaggau

SEQ ID NO: 4575 - RNA, 19 nt, Artificial Sequence
  Description of Artificial Sequence: Synthetic oligonucleotide
ccgcucggagccgucagga

SEQ ID NO: 4576 - RNA, 19 nt, Artificial Sequence
  Description of Artificial Sequence: Synthetic oligonucleotide
gccgcucggagccgucagg

SEQ ID NO: 4577 - RNA, 19 nt, Artificial Sequence
  Description of Artificial Sequence: Synthetic oligonucleotide
ggccgcucggagccgucag

SEQ ID NO: 4578 - RNA, 19 nt, Artificial Sequence
  Description of Artificial Sequence: Synthetic oligonucleotide
uggccgcucggagccguca

SEQ ID NO: 4579 - RNA, 19 nt, Artificial Sequence
  Description of Artificial Sequence: Synthetic oligonucleotide
auggccgcucggagccguc

SEQ ID NO: 4580 - RNA, 19 nt, Artificial Sequence
  Description of Artificial Sequence: Synthetic oligonucleotide
cauggccgcucggagccgu

SEQ ID NO: 4581 - RNA, 19 nt, Artificial Sequence
  Description of Artificial Sequence: Synthetic oligonucleotide
ccauggccgcucggagccg

SEQ ID NO: 4582 - RNA, 19 nt, Artificial Sequence
  Description of Artificial Sequence: Synthetic oligonucleotide
accauggccgcucggagcc

SEQ ID NO: 4583 - RNA, 19 nt, Artificial Sequence
  Description of Artificial Sequence: Synthetic oligonucleotide
caccauggccgcucggagc

SEQ ID NO: 4584 - RNA, 19 nt, Artificial Sequence
  Description of Artificial Sequence: Synthetic oligonucleotide
gcaccauggccgcucggag

SEQ ID NO: 4585 - RNA, 19 nt, Artificial Sequence
  Description of Artificial Sequence: Synthetic oligonucleotide
agcaccauggccgcucgga

SEQ ID NO: 4586 - RNA, 19 nt, Artificial Sequence
  Description of Artificial Sequence: Synthetic oligonucleotide
uagcaccauggccgcucgg

SEQ ID NO: 4587 - RNA, 19 nt, Artificial Sequence
  Description of Artificial Sequence: Synthetic oligonucleotide
guagcaccauggccgcucg

SEQ ID NO: 4588 - RNA, 19 nt, Artificial Sequence
  Description of Artificial Sequence: Synthetic oligonucleotide
uguagcaccauggccgcuc

SEQ ID NO: 4589 - RNA, 19 nt, Artificial Sequence
  Description of Artificial Sequence: Synthetic oligonucleotide
guguagcaccauggccgcu

SEQ ID NO: 4590 - RNA, 19 nt, Artificial Sequence
  Description of Artificial Sequence: Synthetic oligonucleotide
aguguagcaccauggccgc

SEQ ID NO: 4591 - RNA, 19 nt, Artificial Sequence
  Description of Artificial Sequence: Synthetic oligonucleotide
uaguguagcaccauggccg

SEQ ID NO: 4592 - RNA, 19 nt, Artificial Sequence
  Description of Artificial Sequence: Synthetic oligonucleotide
guaguguagcaccauggcc

SEQ ID NO: 4593 - RNA, 19 nt, Artificial Sequence
  Description of Artificial Sequence: Synthetic oligonucleotide
cguaguguagcaccauggc

SEQ ID NO: 4594 - RNA, 19 nt, Artificial Sequence
  Description of Artificial Sequence: Synthetic oligonucleotide
ccguaguguagcaccaugg

SEQ ID NO: 4595 - RNA, 19 nt, Artificial Sequence
  Description of Artificial Sequence: Synthetic oligonucleotide
uccguaguguagcaccaug

SEQ ID NO: 4596 - RNA, 19 nt, Artificial Sequence
  Description of Artificial Sequence: Synthetic oligonucleotide
auccguaguguagcaccau

SEQ ID NO: 4597 - RNA, 19 nt, Artificial Sequence
  Description of Artificial Sequence: Synthetic oligonucleotide
gauccguaguguagcacca

SEQ ID NO: 4598 - RNA, 19 nt, Artificial Sequence
  Description of Artificial Sequence: Synthetic oligonucleotide
ggauccguaguguagcacc

SEQ ID NO: 4599 - RNA, 19 nt, Artificial Sequence
  Description of Artificial Sequence: Synthetic oligonucleotide
cggauccguaguguagcac

SEQ ID NO: 4600 - RNA, 19 nt, Artificial Sequence
  Description of Artificial Sequence: Synthetic oligonucleotide
gcggauccguaguguagca

SEQ ID NO: 4601 - RNA, 19 nt, Artificial Sequence
  Description of Artificial Sequence: Synthetic oligonucleotide
ugcggauccguaguguagc

SEQ ID NO: 4602 - RNA, 19 nt, Artificial Sequence
  Description of Artificial Sequence: Synthetic oligonucleotide
cugcggauccguaguguag

SEQ ID NO: 4603 - RNA, 19 nt, Artificial Sequence
  Description of Artificial Sequence: Synthetic oligonucleotide
ucugcggauccguagugua

SEQ ID NO: 4604 - RNA, 19 nt, Artificial Sequence
  Description of Artificial Sequence: Synthetic oligonucleotide
aucugcggauccguagugu

SEQ ID NO: 4605 - RNA, 19 nt, Artificial Sequence
  Description of Artificial Sequence: Synthetic oligonucleotide
gaucugcggauccguagug

SEQ ID NO: 4606 - RNA, 19 nt, Artificial Sequence
  Description of Artificial Sequence: Synthetic oligonucleotide
cgaucugcggauccguagu

SEQ ID NO: 4607 - RNA, 19 nt, Artificial Sequence
  Description of Artificial Sequence: Synthetic oligonucleotide
ucgaucugcggauccguag

SEQ ID NO: 4608 - RNA, 19 nt, Artificial Sequence
  Description of Artificial Sequence: Synthetic oligonucleotide
cucgaucugcggauccgua

SEQ ID NO: 4609 - RNA, 19 nt, Artificial Sequence
  Description of Artificial Sequence: Synthetic oligonucleotide
gcucgaucugcggauccgu

SEQ ID NO: 4610 - RNA, 19 nt, Artificial Sequence
  Description of Artificial Sequence: Synthetic oligonucleotide
cgcucgaucugcggauccg

SEQ ID NO: 4611 - RNA, 19 nt, Artificial Sequence
  Description of Artificial Sequence: Synthetic oligonucleotide
ucgcucgaucugcggaucc

SEQ ID NO: 4612 - RNA, 19 nt, Artificial Sequence
  Description of Artificial Sequence: Synthetic oligonucleotide
cucgcucgaucugcggauc

SEQ ID NO: 4613 - RNA, 19 nt, Artificial Sequence
  Description of Artificial Sequence: Synthetic oligonucleotide
ucucgcucgaucugcggau

SEQ ID NO: 4614 - RNA, 19 nt, Artificial Sequence
  Description of Artificial Sequence: Synthetic oligonucleotide
cucucgcucgaucugcgga

SEQ ID NO: 4615 - RNA, 19 nt, Artificial Sequence
  Description of Artificial Sequence: Synthetic oligonucleotide
acucucgcucgaucugcgg

SEQ ID NO: 4616 - RNA, 19 nt, Artificial Sequence
  Description of Artificial Sequence: Synthetic oligonucleotide
aacucucgcucgaucugcg

SEQ ID NO: 4617 - RNA, 19 nt, Artificial Sequence
  Description of Artificial Sequence: Synthetic oligonucleotide
gaacucucgcucgaucugc

SEQ ID NO: 4618 - RNA, 19 nt, Artificial Sequence
  Description of Artificial Sequence: Synthetic oligonucleotide
agaacucucgcucgaucug

SEQ ID NO: 4619 - RNA, 19 nt, Artificial Sequence
  Description of Artificial Sequence: Synthetic oligonucleotide
cagaacucucgcucgaucu

SEQ ID NO: 4620 - RNA, 19 nt, Artificial Sequence
  Description of Artificial Sequence: Synthetic oligonucleotide
acagaacucucgcucgauc

SEQ ID NO: 4621 - RNA, 19 nt, Artificial Sequence
  Description of Artificial Sequence: Synthetic oligonucleotide
cacagaacucucgcucgau

SEQ ID NO: 4622 - RNA, 19 nt, Artificial Sequence
  Description of Artificial Sequence: Synthetic oligonucleotide
ucacagaacucucgcucga

SEQ ID NO: 4623 - RNA, 19 nt, Artificial Sequence
  Description of Artificial Sequence: Synthetic oligonucleotide
gucacagaacucucgcucg

SEQ ID NO: 4624 - RNA, 19 nt, Artificial Sequence
  Description of Artificial Sequence: Synthetic oligonucleotide
ggucacagaacucucgcuc

SEQ ID NO: 4625 - RNA, 19 nt, Artificial Sequence
  Description of Artificial Sequence: Synthetic oligonucleotide
aggucacagaacucucgcu

SEQ ID NO: 4626 - RNA, 19 nt, Artificial Sequence
  Description of Artificial Sequence: Synthetic oligonucleotide
gaggucacagaacucucgc

SEQ ID NO: 4627 - RNA, 19 nt, Artificial Sequence
  Description of Artificial Sequence: Synthetic oligonucleotide
ggaggucacagaacucucg

SEQ ID NO: 4628 - RNA, 19 nt, Artificial Sequence
  Description of Artificial Sequence: Synthetic oligonucleotide
gggaggucacagaacucuc

SEQ ID NO: 4629 - RNA, 19 nt, Artificial Sequence
  Description of Artificial Sequence: Synthetic oligonucleotide
ggggaggucacagaacucu

SEQ ID NO: 4630 - RNA, 19 nt, Artificial Sequence
  Description of Artificial Sequence: Synthetic oligonucleotide
gggggaggucacagaacuc

SEQ ID NO: 4631 - RNA, 19 nt, Artificial Sequence
  Description of Artificial Sequence: Synthetic oligonucleotide
cgggggaggucacagaacu

SEQ ID NO: 4632 - RNA, 19 nt, Artificial Sequence
  Description of Artificial Sequence: Synthetic oligonucleotide
gcgggggaggucacagaac

SEQ ID NO: 4633 - RNA, 19 nt, Artificial Sequence
  Description of Artificial Sequence: Synthetic oligonucleotide
agcgggggaggucacagaa

SEQ ID NO: 4634 - RNA, 19 nt, Artificial Sequence
  Description of Artificial Sequence: Synthetic oligonucleotide
cagcgggggaggucacaga

SEQ ID NO: 4635 - RNA, 19 nt, Artificial Sequence
  Description of Artificial Sequence: Synthetic oligonucleotide
gcagcgggggaggucacag

SEQ ID NO: 4636 - RNA, 19 nt, Artificial Sequence
  Description of Artificial Sequence: Synthetic oligonucleotide
cgcagcgggggaggucaca

SEQ ID NO: 4637 - RNA, 19 nt, Artificial Sequence
  Description of Artificial Sequence: Synthetic oligonucleotide
ccgcagcgggggaggucac

SEQ ID NO: 4638 - RNA, 19 nt, Artificial Sequence
  Description of Artificial Sequence: Synthetic oligonucleotide
cccgcagcgggggagguca

SEQ ID NO: 4639 - RNA, 19 nt, Artificial Sequence
  Description of Artificial Sequence: Synthetic oligonucleotide
acccgcagcgggggagguc

SEQ ID NO: 4640 - RNA, 19 nt, Artificial Sequence
  Description of Artificial Sequence: Synthetic oligonucleotide
gacccgcagcgggggaggu

SEQ ID NO: 4641 - RNA, 19 nt, Artificial Sequence
  Description of Artificial Sequence: Synthetic oligonucleotide
ggacccgcagcgggggagg

SEQ ID NO: 4642 - RNA, 19 nt, Artificial Sequence
  Description of Artificial Sequence: Synthetic oligonucleotide
cggacccgcagcgggggag

SEQ ID NO: 4643 - RNA, 19 nt, Artificial Sequence
  Description of Artificial Sequence: Synthetic oligonucleotide
ucggacccgcagcggggga

SEQ ID NO: 4644 - RNA, 19 nt, Artificial Sequence
  Description of Artificial Sequence: Synthetic oligonucleotide
cucggacccgcagcggggg

SEQ ID NO: 4645 - RNA, 19 nt, Artificial Sequence
  Description of Artificial Sequence: Synthetic oligonucleotide
ccucggacccgcagcgggg

SEQ ID NO: 4646 - RNA, 19 nt, Artificial Sequence
  Description of Artificial Sequence: Synthetic oligonucleotide
gccucggacccgcagcggg

SEQ ID NO: 4647 - RNA, 19 nt, Artificial Sequence
  Description of Artificial Sequence: Synthetic oligonucleotide
ugccucggacccgcagcgg

SEQ ID NO: 4648 - RNA, 19 nt, Artificial Sequence
  Description of Artificial Sequence: Synthetic oligonucleotide
gugccucggacccgcagcg

SEQ ID NO: 4649 - RNA, 19 nt, Artificial Sequence
  Description of Artificial Sequence: Synthetic oligonucleotide
ugugccucggacccgcagc

SEQ ID NO: 4650 - RNA, 19 nt, Artificial Sequence
  Description of Artificial Sequence: Synthetic oligonucleotide
cugugccucggacccgcag

SEQ ID NO: 4651 - RNA, 19 nt, Artificial Sequence
  Description of Artificial Sequence: Synthetic oligonucleotide
gcugugccucggacccgca

SEQ ID NO: 4652 - RNA, 19 nt, Artificial Sequence
  Description of Artificial Sequence: Synthetic oligonucleotide
ggcugugccucggacccgc

SEQ ID NO: 4653 - RNA, 19 nt, Artificial Sequence
  Description of Artificial Sequence: Synthetic oligonucleotide
gggcugugccucggacccg

SEQ ID NO: 4654 - RNA, 19 nt, Artificial Sequence
  Description of Artificial Sequence: Synthetic oligonucleotide
ggggcugugccucggaccc

SEQ ID NO: 4655 - RNA, 19 nt, Artificial Sequence
  Description of Artificial Sequence: Synthetic oligonucleotide
cggggcugugccucggacc

SEQ ID NO: 4656 - RNA, 19 nt, Artificial Sequence
  Description of Artificial Sequence: Synthetic oligonucleotide
gcggggcugugccucggac

SEQ ID NO: 4657 - RNA, 19 nt, Artificial Sequence
  Description of Artificial Sequence: Synthetic oligonucleotide
ggcggggcugugccucgga

SEQ ID NO: 4658 - RNA, 19 nt, Artificial Sequence
  Description of Artificial Sequence: Synthetic oligonucleotide
uggcggggcugugccucgg

SEQ ID NO: 4659 - RNA, 19 nt, Artificial Sequence
  Description of Artificial Sequence: Synthetic oligonucleotide
uuggcggggcugugccucg

SEQ ID NO: 4660 - RNA, 19 nt, Artificial Sequence
  Description of Artificial Sequence: Synthetic oligonucleotide
cuuggcggggcugugccuc

SEQ ID NO: 4661 - RNA, 19 nt, Artificial Sequence
  Description of Artificial Sequence: Synthetic oligonucleotide
ucuuggcggggcugugccu

SEQ ID NO: 4662 - RNA, 19 nt, Artificial Sequence
  Description of Artificial Sequence: Synthetic oligonucleotide
cucuuggcggggcugugcc

SEQ ID NO: 4663 - RNA, 19 nt, Artificial Sequence
  Description of Artificial Sequence: Synthetic oligonucleotide
ccucuuggcggggcugugc

SEQ ID NO: 4664 - RNA, 19 nt, Artificial Sequence
  Description of Artificial Sequence: Synthetic oligonucleotide
gccucuuggcggggcugug

SEQ ID NO: 4665 - RNA, 19 nt, Artificial Sequence
  Description of Artificial Sequence: Synthetic oligonucleotide
ggccucuuggcggggcugu

SEQ ID NO: 4666 - RNA, 19 nt, Artificial Sequence
  Description of Artificial Sequence: Synthetic oligonucleotide
uggccucuuggcggggcug

SEQ ID NO: 4667 - RNA, 19 nt, Artificial Sequence
  Description of Artificial Sequence: Synthetic oligonucleotide
guggccucuuggcggggcu

SEQ ID NO: 4668 - RNA, 19 nt, Artificial Sequence
  Description of Artificial Sequence: Synthetic oligonucleotide
uguggccucuuggcggggc

SEQ ID NO: 4669 - RNA, 19 nt, Artificial Sequence
  Description of Artificial Sequence: Synthetic oligonucleotide
uuguggccucuuggcgggg

SEQ ID NO: 4670 - RNA, 19 nt, Artificial Sequence
  Description of Artificial Sequence: Synthetic oligonucleotide
guuguggccucuuggcggg

SEQ ID NO: 4671 - RNA, 19 nt, Artificial Sequence
  Description of Artificial Sequence: Synthetic oligonucleotide
aguuguggccucuuggcgg

SEQ ID NO: 4672 - RNA, 19 nt, Artificial Sequence
  Description of Artificial Sequence: Synthetic oligonucleotide
caguuguggccucuuggcg

SEQ ID NO: 4673 - RNA, 19 nt, Artificial Sequence
  Description of Artificial Sequence: Synthetic oligonucleotide
acaguuguggccucuuggc

SEQ ID NO: 4674 - RNA, 19 nt, Artificial Sequence
  Description of Artificial Sequence: Synthetic oligonucleotide
gacaguuguggccucuugg

SEQ ID NO: 4675 - RNA, 19 nt, Artificial Sequence
  Description of Artificial Sequence: Synthetic oligonucleotide
ugacaguuguggccucuug

SEQ ID NO: 4676 - RNA, 19 nt, Artificial Sequence
  Description of Artificial Sequence: Synthetic oligonucleotide
cugacaguuguggccucuu

SEQ ID NO: 4677 - RNA, 19 nt, Artificial Sequence
  Description of Artificial Sequence: Synthetic oligonucleotide
gcugacaguuguggccucu

SEQ ID NO: 4678 - RNA, 19 nt, Artificial Sequence
  Description of Artificial Sequence: Synthetic oligonucleotide
agcugacaguuguggccuc

SEQ ID NO: 4679 - RNA, 19 nt, Artificial Sequence
  Description of Artificial Sequence: Synthetic oligonucleotide
cagcugacaguuguggccu

SEQ ID NO: 4680 - RNA, 19 nt, Artificial Sequence
  Description of Artificial Sequence: Synthetic oligonucleotide
gcagcugacaguuguggcc

SEQ ID NO: 4681 - RNA, 19 nt, Artificial Sequence
  Description of Artificial Sequence: Synthetic oligonucleotide
agcagcugacaguuguggc

SEQ ID NO: 4682 - RNA, 19 nt, Artificial Sequence
  Description of Artificial Sequence: Synthetic oligonucleotide
aagcagcugacaguugugg

SEQ ID NO: 4683 - RNA, 19 nt, Artificial Sequence
  Description of Artificial Sequence: Synthetic oligonucleotide
gaagcagcugacaguugug

SEQ ID NO: 4684 - RNA, 19 nt, Artificial Sequence
  Description of Artificial Sequence: Synthetic oligonucleotide
ggaagcagcugacaguugu

SEQ ID NO: 4685 - RNA, 19 nt, Artificial Sequence
  Description of Artificial Sequence: Synthetic oligonucleotide
cggaagcagcugacaguug

SEQ ID NO: 4686 - RNA, 19 nt, Artificial Sequence
  Description of Artificial Sequence: Synthetic oligonucleotide
gcggaagcagcugacaguu

SEQ ID NO: 4687 - RNA, 19 nt, Artificial Sequence
  Description of Artificial Sequence: Synthetic oligonucleotide
cgcggaagcagcugacagu

SEQ ID NO: 4688 - RNA, 19 nt, Artificial Sequence
  Description of Artificial Sequence: Synthetic oligonucleotide
ccgcggaagcagcugacag

SEQ ID NO: 4689 - RNA, 19 nt, Artificial Sequence
  Description of Artificial Sequence: Synthetic oligonucleotide
cccgcggaagcagcugaca

SEQ ID NO: 4690 - RNA, 19 nt, Artificial Sequence
  Description of Artificial Sequence: Synthetic oligonucleotide
ucccgcggaagcagcugac

SEQ ID NO: 4691 - RNA, 19 nt, Artificial Sequence
  Description of Artificial Sequence: Synthetic oligonucleotide
uucccgcggaagcagcuga

SEQ ID NO: 4692 - RNA, 19 nt, Artificial Sequence
  Description of Artificial Sequence: Synthetic oligonucleotide
cuucccgcggaagcagcug

SEQ ID NO: 4693 - RNA, 19 nt, Artificial Sequence
  Description of Artificial Sequence: Synthetic oligonucleotide
ccuucccgcggaagcagcu

SEQ ID NO: 4694 - RNA, 19 nt, Artificial Sequence
  Description of Artificial Sequence: Synthetic oligonucleotide
cccuucccgcggaagcagc

SEQ ID NO: 4695 - RNA, 19 nt, Artificial Sequence
  Description of Artificial Sequence: Synthetic oligonucleotide
acccuucccgcggaagcag

SEQ ID NO: 4696 - RNA, 19 nt, Artificial Sequence
  Description of Artificial Sequence: Synthetic oligonucleotide
cacccuucccgcggaagca

SEQ ID NO: 4697 - RNA, 19 nt, Artificial Sequence
  Description of Artificial Sequence: Synthetic oligonucleotide
ucacccuucccgcggaagc

SEQ ID NO: 4698 - RNA, 19 nt, Artificial Sequence
  Description of Artificial Sequence: Synthetic oligonucleotide
cucacccuucccgcggaag

SEQ ID NO: 4699 - RNA, 19 nt, Artificial Sequence
  Description of Artificial Sequence: Synthetic oligonucleotide
ccucacccuucccgcggaa

SEQ ID NO: 4700 - RNA, 19 nt, Artificial Sequence
  Description of Artificial Sequence: Synthetic oligonucleotide
cccucacccuucccgcgga

SEQ ID NO: 4701 - RNA, 19 nt, Artificial Sequence
  Description of Artificial Sequence: Synthetic oligonucleotide
gcccucacccuucccgcgg

SEQ ID NO: 4702 - RNA, 19 nt, Artificial Sequence
  Description of Artificial Sequence: Synthetic oligonucleotide
agcccucacccuucccgcg

SEQ ID NO: 4703 - RNA, 19 nt, Artificial Sequence
  Description of Artificial Sequence: Synthetic oligonucleotide
uagcccucacccuucccgc

SEQ ID NO: 4704 - RNA, 19 nt, Artificial Sequence
  Description of Artificial Sequence: Synthetic oligonucleotide
guagcccucacccuucccg

SEQ ID NO: 4705 - RNA, 19 nt, Artificial Sequence
  Description of Artificial Sequence: Synthetic oligonucleotide
gguagcccucacccuuccc

SEQ ID NO: 4706 - RNA, 19 nt, Artificial Sequence
  Description of Artificial Sequence: Synthetic oligonucleotide
cgguagcccucacccuucc

SEQ ID NO: 4707 - RNA, 19 nt, Artificial Sequence
  Description of Artificial Sequence: Synthetic oligonucleotide
ccgguagcccucacccuuc

SEQ ID NO: 4708 - RNA, 19 nt, Artificial Sequence
  Description of Artificial Sequence: Synthetic oligonucleotide
cccgguagcccucacccuu

SEQ ID NO: 4709 - RNA, 19 nt, Artificial Sequence
  Description of Artificial Sequence: Synthetic oligonucleotide
ccccgguagcccucacccu

SEQ ID NO: 4710 - RNA, 19 nt, Artificial Sequence
  Description of Artificial Sequence: Synthetic oligonucleotide
gccccgguagcccucaccc

SEQ ID NO: 4711 - RNA, 19 nt, Artificial Sequence
  Description of Artificial Sequence: Synthetic oligonucleotide
ugccccgguagcccucacc

SEQ ID NO: 4712 - RNA, 19 nt, Artificial Sequence
  Description of Artificial Sequence: Synthetic oligonucleotide
gugccccgguagcccucac

SEQ ID NO: 4713 - RNA, 19 nt, Artificial Sequence
  Description of Artificial Sequence: Synthetic oligonucleotide
ugugccccgguagcccuca

SEQ ID NO: 4714 - RNA, 19 nt, Artificial Sequence
  Description of Artificial Sequence: Synthetic oligonucleotide
cugugccccgguagcccuc

SEQ ID NO: 4715 - RNA, 19 nt, Artificial Sequence
  Description of Artificial Sequence: Synthetic oligonucleotide
gcugugccccgguagcccu

SEQ ID NO: 4716 - RNA, 19 nt, Artificial Sequence
  Description of Artificial Sequence: Synthetic oligonucleotide
ggcugugccccgguagccc

SEQ ID NO: 4717 - RNA, 19 nt, Artificial Sequence
  Description of Artificial Sequence: Synthetic oligonucleotide
uggcugugccccgguagcc

SEQ ID NO: 4718 - RNA, 19 nt, Artificial Sequence
  Description of Artificial Sequence: Synthetic oligonucleotide
uuggcugugccccgguagc

SEQ ID NO: 4719 - RNA, 19 nt, Artificial Sequence
  Description of Artificial Sequence: Synthetic oligonucleotide
auuggcugugccccgguag

SEQ ID NO: 4720 - RNA, 19 nt, Artificial Sequence
  Description of Artificial Sequence: Synthetic oligonucleotide
uauuggcugugccccggua

SEQ ID NO: 4721 - RNA, 19 nt, Artificial Sequence
  Description of Artificial Sequence: Synthetic oligonucleotide
guauuggcugugccccggu

SEQ ID NO: 4722 - RNA, 19 nt, Artificial Sequence
  Description of Artificial Sequence: Synthetic oligonucleotide
gguauuggcugugccccgg

SEQ ID NO: 4723 - RNA, 19 nt, Artificial Sequence
  Description of Artificial Sequence: Synthetic oligonucleotide
ugguauuggcugugccccg

SEQ ID NO: 4724 - RNA, 19 nt, Artificial Sequence
  Description of Artificial Sequence: Synthetic oligonucleotide
gugguauuggcugugcccc

SEQ ID NO: 4725 - RNA, 19 nt, Artificial Sequence
  Description of Artificial Sequence: Synthetic oligonucleotide
ggugguauuggcugugccc

SEQ ID NO: 4726 - RNA, 19 nt, Artificial Sequence
  Description of Artificial Sequence: Synthetic oligonucleotide
uggugguauuggcugugcc

SEQ ID NO: 4727 - RNA, 19 nt, Artificial Sequence
  Description of Artificial Sequence: Synthetic oligonucleotide
guggugguauuggcugugc

SEQ ID NO: 4728 - RNA, 19 nt, Artificial Sequence
  Description of Artificial Sequence: Synthetic oligonucleotide
aguggugguauuggcugug

SEQ ID NO: 4729 - RNA, 19 nt, Artificial Sequence
  Description of Artificial Sequence: Synthetic oligonucleotide
caguggugguauuggcugu

SEQ ID NO: 4730 - RNA, 19 nt, Artificial Sequence
  Description of Artificial Sequence: Synthetic oligonucleotide
gcaguggugguauuggcug

SEQ ID NO: 4731 - RNA, 19 nt, Artificial Sequence
  Description of Artificial Sequence: Synthetic oligonucleotide
cgcaguggugguauuggcu

SEQ ID NO: 4732 - RNA, 19 nt, Artificial Sequence
  Description of Artificial Sequence: Synthetic oligonucleotide
ccgcaguggugguauuggc

SEQ ID NO: 4733 - RNA, 19 nt, Artificial Sequence
  Description of Artificial Sequence: Synthetic oligonucleotide
cccgcaguggugguauugg

SEQ ID NO: 4734 - RNA, 19 nt, Artificial Sequence
  Description of Artificial Sequence: Synthetic oligonucleotide
gcccgcaguggugguauug

SEQ ID NO: 4735 - RNA, 19 nt, Artificial Sequence
  Description of Artificial Sequence: Synthetic oligonucleotide
cgcccgcaguggugguauu

SEQ ID NO: 4736 - RNA, 19 nt, Artificial Sequence
  Description of Artificial Sequence: Synthetic oligonucleotide
acgcccgcaguggugguau

SEQ ID NO: 4737 - RNA, 19 nt, Artificial Sequence
  Description of Artificial Sequence: Synthetic oligonucleotide
uacgcccgcagugguggua

SEQ ID NO: 4738 - RNA, 19 nt, Artificial Sequence
  Description of Artificial Sequence: Synthetic oligonucleotide
guacgcccgcagugguggu

SEQ ID NO: 4739 - RNA, 19 nt, Artificial Sequence
  Description of Artificial Sequence: Synthetic oligonucleotide
gguacgcccgcaguggugg

SEQ ID NO: 4740 - RNA, 19 nt, Artificial Sequence
  Description of Artificial Sequence: Synthetic oligonucleotide
agguacgcccgcaguggug

SEQ ID NO: 4741 - RNA, 19 nt, Artificial Sequence
  Description of Artificial Sequence: Synthetic oligonucleotide
aagguacgcccgcaguggu

SEQ ID NO: 4742 - RNA, 19 nt, Artificial Sequence
  Description of Artificial Sequence: Synthetic oligonucleotide
caagguacgcccgcagugg

SEQ ID NO: 4743 - RNA, 19 nt, Artificial Sequence
  Description of Artificial Sequence: Synthetic oligonucleotide
gcaagguacgcccgcagug

SEQ ID NO: 4744 - RNA, 19 nt, Artificial Sequence
  Description of Artificial Sequence: Synthetic oligonucleotide
ggcaagguacgcccgcagu

SEQ ID NO: 4745 - RNA, 19 nt, Artificial Sequence
  Description of Artificial Sequence: Synthetic oligonucleotide
uggcaagguacgcccgcag

SEQ ID NO: 4746 - RNA, 19 nt, Artificial Sequence
  Description of Artificial Sequence: Synthetic oligonucleotide
cuggcaagguacgcccgca

SEQ ID NO: 4747 - RNA, 19 nt, Artificial Sequence
  Description of Artificial Sequence: Synthetic oligonucleotide
gcuggcaagguacgcccgc

SEQ ID NO: 4748 - RNA, 19 nt, Artificial Sequence
  Description of Artificial Sequence: Synthetic oligonucleotide
cgcuggcaagguacgcccg

SEQ ID NO: 4749 - RNA, 19 nt, Artificial Sequence
  Description of Artificial Sequence: Synthetic oligonucleotide
acgcuggcaagguacgccc

SEQ ID NO: 4750 - RNA, 19 nt, Artificial Sequence
  Description of Artificial Sequence: Synthetic oligonucleotide
aacgcuggcaagguacgcc

SEQ ID NO: 4751 - RNA, 19 nt, Artificial Sequence
  Description of Artificial Sequence: Synthetic oligonucleotide
caacgcuggcaagguacgc

SEQ ID NO: 4752 - RNA, 19 nt, Artificial Sequence
  Description of Artificial Sequence: Synthetic oligonucleotide
ccaacgcuggcaagguacg

SEQ ID NO: 4753 - RNA, 19 nt, Artificial Sequence
  Description of Artificial Sequence: Synthetic oligonucleotide
cccaacgcuggcaagguac

SEQ ID NO: 4754 - RNA, 19 nt, Artificial Sequence
  Description of Artificial Sequence: Synthetic oligonucleotide
ucccaacgcuggcaaggua

SEQ ID NO: 4755 - RNA, 19 nt, Artificial Sequence
  Description of Artificial Sequence: Synthetic oligonucleotide
gucccaacgcuggcaaggu

SEQ ID NO: 4756 - RNA, 19 nt, Artificial Sequence
  Description of Artificial Sequence: Synthetic oligonucleotide
cgucccaacgcuggcaagg

SEQ ID NO: 4757 - RNA, 19 nt, Artificial Sequence
  Description of Artificial Sequence: Synthetic oligonucleotide
gcgucccaacgcuggcaag

SEQ ID NO: 4758 - RNA, 19 nt, Artificial Sequence
  Description of Artificial Sequence: Synthetic oligonucleotide
cgcgucccaacgcuggcaa

SEQ ID NO: 4759 - RNA, 19 nt, Artificial Sequence
  Description of Artificial Sequence: Synthetic oligonucleotide
gcgcgucccaacgcuggca

SEQ ID NO: 4760 - RNA, 19 nt, Artificial Sequence
  Description of Artificial Sequence: Synthetic oligonucleotide
ugcgcgucccaacgcuggc

SEQ ID NO: 4761 - RNA, 19 nt, Artificial Sequence
  Description of Artificial Sequence: Synthetic oligonucleotide
uugcgcgucccaacgcugg

SEQ ID NO: 4762 - RNA, 19 nt, Artificial Sequence
  Description of Artificial Sequence: Synthetic oligonucleotide
uuugcgcgucccaacgcug

SEQ ID NO: 4763 - RNA, 19 nt, Artificial Sequence
  Description of Artificial Sequence: Synthetic oligonucleotide
auuugcgcgucccaacgcu

SEQ ID NO: 4764 - RNA, 19 nt, Artificial Sequence
  Description of Artificial Sequence: Synthetic oligonucleotide
gauuugcgcgucccaacgc

SEQ ID NO: 4765 - RNA, 19 nt, Artificial Sequence
  Description of Artificial Sequence: Synthetic oligonucleotide
ggauuugcgcgucccaacg

SEQ ID NO: 4766 - RNA, 19 nt, Artificial Sequence
  Description of Artificial Sequence: Synthetic oligonucleotide
gggauuugcgcgucccaac

SEQ ID NO: 4767 - RNA, 19 nt, Artificial Sequence
  Description of Artificial Sequence: Synthetic oligonucleotide
cgggauuugcgcgucccaa

SEQ ID NO: 4768 - RNA, 19 nt, Artificial Sequence
  Description of Artificial Sequence: Synthetic oligonucleotide
gcgggauuugcgcguccca

SEQ ID NO: 4769 - RNA, 19 nt, Artificial Sequence
  Description of Artificial Sequence: Synthetic oligonucleotide
ugcgggauuugcgcguccc

SEQ ID NO: 4770 - RNA, 19 nt, Artificial Sequence
  Description of Artificial Sequence: Synthetic oligonucleotide
augcgggauuugcgcgucc

SEQ ID NO: 4771 - RNA, 19 nt, Artificial Sequence
  Description of Artificial Sequence: Synthetic oligonucleotide
gaugcgggauuugcgcguc

SEQ ID NO: 4772 - RNA, 19 nt, Artificial Sequence
  Description of Artificial Sequence: Synthetic oligonucleotide
ugaugcgggauuugcgcgu

SEQ ID NO: 4773 - RNA, 19 nt, Artificial Sequence
  Description of Artificial Sequence: Synthetic oligonucleotide
cugaugcgggauuugcgcg

SEQ ID NO: 4774 - RNA, 19 nt, Artificial Sequence
  Description of Artificial Sequence: Synthetic oligonucleotide
gcugaugcgggauuugcgc

SEQ ID NO: 4775 - RNA, 19 nt, Artificial Sequence
  Description of Artificial Sequence: Synthetic oligonucleotide
ugcugaugcgggauuugcg

SEQ ID NO: 4776 - RNA, 19 nt, Artificial Sequence
  Description of Artificial Sequence: Synthetic oligonucleotide
gugcugaugcgggauuugc

SEQ ID NO: 4777 - RNA, 19 nt, Artificial Sequence
  Description of Artificial Sequence: Synthetic oligonucleotide
ggugcugaugcgggauuug

SEQ ID NO: 4778 - RNA, 19 nt, Artificial Sequence
  Description of Artificial Sequence: Synthetic oligonucleotide
cggugcugaugcgggauuu

SEQ ID NO: 4779 - RNA, 19 nt, Artificial Sequence
  Description of Artificial Sequence: Synthetic oligonucleotide
ucggugcugaugcgggauu

SEQ ID NO: 4780 - RNA, 19 nt, Artificial Sequence
  Description of Artificial Sequence: Synthetic oligonucleotide
aucggugcugaugcgggau

SEQ ID NO: 4781 - RNA, 19 nt, Artificial Sequence
  Description of Artificial Sequence: Synthetic oligonucleotide
aaucggugcugaugcggga

SEQ ID NO: 4782 - RNA, 19 nt, Artificial Sequence
  Description of Artificial Sequence: Synthetic oligonucleotide
aaaucggugcugaugcggg

SEQ ID NO: 4783 - RNA, 19 nt, Artificial Sequence
  Description of Artificial Sequence: Synthetic oligonucleotide
uaaaucggugcugaugcgg

SEQ ID NO: 4784 - RNA, 19 nt, Artificial Sequence
  Description of Artificial Sequence: Synthetic oligonucleotide
guaaaucggugcugaugcg

SEQ ID NO: 4785 - RNA, 19 nt, Artificial Sequence
  Description of Artificial Sequence: Synthetic oligonucleotide
cguaaaucggugcugaugc

SEQ ID NO: 4786 - RNA, 19 nt, Artificial Sequence
  Description of Artificial Sequence: Synthetic oligonucleotide
gcguaaaucggugcugaug

SEQ ID NO: 4787 - RNA, 19 nt, Artificial Sequence
  Description of Artificial Sequence: Synthetic oligonucleotide
ggcguaaaucggugcugau

SEQ ID NO: 4788 - RNA, 19 nt, Artificial Sequence
  Description of Artificial Sequence: Synthetic oligonucleotide
uggcguaaaucggugcuga

SEQ ID NO: 4789 - RNA, 19 nt, Artificial Sequence
  Description of Artificial Sequence: Synthetic oligonucleotide
cuggcguaaaucggugcug

SEQ ID NO: 4790 - RNA, 19 nt, Artificial Sequence
  Description of Artificial Sequence: Synthetic oligonucleotide
ucuggcguaaaucggugcu

SEQ ID NO: 4791 - RNA, 19 nt, Artificial Sequence
  Description of Artificial Sequence: Synthetic oligonucleotide
uucuggcguaaaucggugc

SEQ ID NO: 4792 - RNA, 19 nt, Artificial Sequence
  Description of Artificial Sequence: Synthetic oligonucleotide
uuucuggcguaaaucggug

SEQ ID NO: 4793 - RNA, 19 nt, Artificial Sequence
  Description of Artificial Sequence: Synthetic oligonucleotide
uuuucuggcguaaaucggu

SEQ ID NO: 4794 - RNA, 19 nt, Artificial Sequence
  Description of Artificial Sequence: Synthetic oligonucleotide
uuuuucuggcguaaaucgg

SEQ ID NO: 4795 - RNA, 19 nt, Artificial Sequence
  Description of Artificial Sequence: Synthetic oligonucleotide
auuuuucuggcguaaaucg

SEQ ID NO: 4796 - RNA, 19 nt, Artificial Sequence
  Description of Artificial Sequence: Synthetic oligonucleotide
uauuuuucuggcguaaauc

SEQ ID NO: 4797 - RNA, 19 nt, Artificial Sequence
  Description of Artificial Sequence: Synthetic oligonucleotide
guauuuuucuggcguaaau

SEQ ID NO: 4798 - RNA, 19 nt, Artificial Sequence
  Description of Artificial Sequence: Synthetic oligonucleotide
cguauuuuucuggcguaaa

SEQ ID NO: 4799 - RNA, 19 nt, Artificial Sequence
  Description of Artificial Sequence: Synthetic oligonucleotide
gcguauuuuucuggcguaa

SEQ ID NO: 4800 - RNA, 19 nt, Artificial Sequence
  Description of Artificial Sequence: Synthetic oligonucleotide
cgcguauuuuucuggcgua

SEQ ID NO: 4801 - RNA, 19 nt, Artificial Sequence
  Description of Artificial Sequence: Synthetic oligonucleotide
acgcguauuuuucuggcgu

SEQ ID NO: 4802 - RNA, 19 nt, Artificial Sequence
  Description of Artificial Sequence: Synthetic oligonucleotide
cacgcguauuuuucuggcg

SEQ ID NO: 4803 - RNA, 19 nt, Artificial Sequence
  Description of Artificial Sequence: Synthetic oligonucleotide
gcacgcguauuuuucuggc

SEQ ID NO: 4804 - RNA, 19 nt, Artificial Sequence
  Description of Artificial Sequence: Synthetic oligonucleotide
ugcacgcguauuuuucugg

SEQ ID NO: 4805 - RNA, 19 nt, Artificial Sequence
  Description of Artificial Sequence: Synthetic oligonucleotide
uugcacgcguauuuuucug

SEQ ID NO: 4806 - RNA, 19 nt, Artificial Sequence
  Description of Artificial Sequence: Synthetic oligonucleotide
uuugcacgcguauuuuucu

SEQ ID NO: 4807 - RNA, 19 nt, Artificial Sequence
  Description of Artificial Sequence: Synthetic oligonucleotide
cuuugcacgcguauuuuuc

SEQ ID NO: 4808 - RNA, 19 nt, Artificial Sequence
  Description of Artificial Sequence: Synthetic oligonucleotide
ucuuugcacgcguauuuuu

SEQ ID NO: 4809 - RNA, 19 nt, Artificial Sequence
  Description of Artificial Sequence: Synthetic oligonucleotide
gucuuugcacgcguauuuu

SEQ ID NO: 4810 - RNA, 19 nt, Artificial Sequence
  Description of Artificial Sequence: Synthetic oligonucleotide
ggucuuugcacgcguauuu

SEQ ID NO: 4811 - RNA, 19 nt, Artificial Sequence
  Description of Artificial Sequence: Synthetic oligonucleotide
aggucuuugcacgcguauu

SEQ ID NO: 4812 - RNA, 19 nt, Artificial Sequence
  Description of Artificial Sequence: Synthetic oligonucleotide
aaggucuuugcacgcguau

SEQ ID NO: 4813 - RNA, 19 nt, Artificial Sequence
  Description of Artificial Sequence: Synthetic oligonucleotide
gaaggucuuugcacgcgua

SEQ ID NO: 4814 - RNA, 19 nt, Artificial Sequence
  Description of Artificial Sequence: Synthetic oligonucleotide
cgaaggucuuugcacgcgu

SEQ ID NO: 4815 - RNA, 19 nt, Artificial Sequence
  Description of Artificial Sequence: Synthetic oligonucleotide
ccgaaggucuuugcacgcg

SEQ ID NO: 4816 - RNA, 19 nt, Artificial Sequence
  Description of Artificial Sequence: Synthetic oligonucleotide
cccgaaggucuuugcacgc

SEQ ID NO: 4817 - RNA, 19 nt, Artificial Sequence
  Description of Artificial Sequence: Synthetic oligonucleotide
ucccgaaggucuuugcacg

SEQ ID NO: 4818 - RNA, 19 nt, Artificial Sequence
  Description of Artificial Sequence: Synthetic oligonucleotide
cucccgaaggucuuugcac

SEQ ID NO: 4819 - RNA, 19 nt, Artificial Sequence
  Description of Artificial Sequence: Synthetic oligonucleotide
ucucccgaaggucuuugca

SEQ ID NO: 4820 - RNA, 19 nt, Artificial Sequence
  Description of Artificial Sequence: Synthetic oligonucleotide
uucucccgaaggucuuugc

SEQ ID NO: 4821 - RNA, 19 nt, Artificial Sequence
  Description of Artificial Sequence: Synthetic oligonucleotide
guucucccgaaggucuuug

SEQ ID NO: 4822 - RNA, 19 nt, Artificial Sequence
  Description of Artificial Sequence: Synthetic oligonucleotide
aguucucccgaaggucuuu

SEQ ID NO: 4823 - RNA, 19 nt, Artificial Sequence
  Description of Artificial Sequence: Synthetic oligonucleotide
aaguucucccgaaggucuu

SEQ ID NO: 4824 - RNA, 19 nt, Artificial Sequence
  Description of Artificial Sequence: Synthetic oligonucleotide
gaaguucucccgaaggucu

SEQ ID NO: 4825 - RNA, 19 nt, Artificial Sequence
  Description of Artificial Sequence: Synthetic oligonucleotide
agaaguucucccgaagguc

SEQ ID NO: 4826 - RNA, 19 nt, Artificial Sequence
  Description of Artificial Sequence: Synthetic oligonucleotide
cagaaguucucccgaaggu

SEQ ID NO: 4827 - RNA, 19 nt, Artificial Sequence
  Description of Artificial Sequence: Synthetic oligonucleotide
gcagaaguucucccgaagg

SEQ ID NO: 4828 - RNA, 19 nt, Artificial Sequence
  Description of Artificial Sequence: Synthetic oligonucleotide
ggcagaaguucucccgaag

SEQ ID NO: 4829 - RNA, 19 nt, Artificial Sequence
  Description of Artificial Sequence: Synthetic oligonucleotide
cggcagaaguucucccgaa

SEQ ID NO: 4830 - RNA, 19 nt, Artificial Sequence
  Description of Artificial Sequence: Synthetic oligonucleotide
ccggcagaaguucucccga

SEQ ID NO: 4831 - RNA, 19 nt, Artificial Sequence
  Description of Artificial Sequence: Synthetic oligonucleotide
uccggcagaaguucucccg

SEQ ID NO: 4832 - RNA, 19 nt, Artificial Sequence
  Description of Artificial Sequence: Synthetic oligonucleotide
uuccggcagaaguucuccc

SEQ ID NO: 4833 - RNA, 19 nt, Artificial Sequence
  Description of Artificial Sequence: Synthetic oligonucleotide
guuccggcagaaguucucc

SEQ ID NO: 4834 - RNA, 19 nt, Artificial Sequence
  Description of Artificial Sequence: Synthetic oligonucleotide
gguuccggcagaaguucuc

SEQ ID NO: 4835 - RNA, 19 nt, Artificial Sequence
  Description of Artificial Sequence: Synthetic oligonucleotide
ggguuccggcagaaguucu

SEQ ID NO: 4836 - RNA, 19 nt, Artificial Sequence
  Description of Artificial Sequence: Synthetic oligonucleotide
gggguuccggcagaaguuc

SEQ ID NO: 4837 - RNA, 19 nt, Artificial Sequence
  Description of Artificial Sequence: Synthetic oligonucleotide
cgggguuccggcagaaguu

SEQ ID NO: 4838 - RNA, 19 nt, Artificial Sequence
  Description of Artificial Sequence: Synthetic oligonucleotide
ucgggguuccggcagaagu

SEQ ID NO: 4839 - RNA, 19 nt, Artificial Sequence
  Description of Artificial Sequence: Synthetic oligonucleotide
gucgggguuccggcagaag

SEQ ID NO: 4840 - RNA, 19 nt, Artificial Sequence
  Description of Artificial Sequence: Synthetic oligonucleotide
cgucgggguuccggcagaa

SEQ ID NO: 4841 - RNA, 19 nt, Artificial Sequence
  Description of Artificial Sequence: Synthetic oligonucleotide
ccgucgggguuccggcaga

SEQ ID NO: 4842 - RNA, 19 nt, Artificial Sequence
  Description of Artificial Sequence: Synthetic oligonucleotide
gccgucgggguuccggcag

SEQ ID NO: 4843 - RNA, 19 nt, Artificial Sequence
  Description of Artificial Sequence: Synthetic oligonucleotide
agccgucgggguuccggca

SEQ ID NO: 4844 - RNA, 19 nt, Artificial Sequence
  Description of Artificial Sequence: Synthetic oligonucleotide
gagccgucgggguuccggc

SEQ ID NO: 4845 - RNA, 19 nt, Artificial Sequence
  Description of Artificial Sequence: Synthetic oligonucleotide
ugagccgucgggguuccgg

SEQ ID NO: 4846 - RNA, 19 nt, Artificial Sequence
  Description of Artificial Sequence: Synthetic oligonucleotide
cugagccgucgggguuccg

SEQ ID NO: 4847 - RNA, 19 nt, Artificial Sequence
  Description of Artificial Sequence: Synthetic oligonucleotide
ucugagccgucgggguucc

SEQ ID NO: 4848 - RNA, 19 nt, Artificial Sequence
  Description of Artificial Sequence: Synthetic oligonucleotide
cucugagccgucgggguuc

SEQ ID NO: 4849 - RNA, 19 nt, Artificial Sequence
  Description of Artificial Sequence: Synthetic oligonucleotide
ccucugagccgucgggguu

SEQ ID NO: 4850 - RNA, 19 nt, Artificial Sequence
  Description of Artificial Sequence: Synthetic oligonucleotide
gccucugagccgucggggu

SEQ ID NO: 4851 - RNA, 19 nt, Artificial Sequence
  Description of Artificial Sequence: Synthetic oligonucleotide
cgccucugagccgucgggg

SEQ ID NO: 4852 - RNA, 19 nt, Artificial Sequence
  Description of Artificial Sequence: Synthetic oligonucleotide
gcgccucugagccgucggg

SEQ ID NO: 4853 - RNA, 19 nt, Artificial Sequence
  Description of Artificial Sequence: Synthetic oligonucleotide
ggcgccucugagccgucgg

SEQ ID NO: 4854 - RNA, 19 nt, Artificial Sequence
  Description of Artificial Sequence: Synthetic oligonucleotide
gggcgccucugagccgucg

SEQ ID NO: 4855 - RNA, 19 nt, Artificial Sequence
  Description of Artificial Sequence: Synthetic oligonucleotide
agggcgccucugagccguc

SEQ ID NO: 4856 - RNA, 19 nt, Artificial Sequence
  Description of Artificial Sequence: Synthetic oligonucleotide
cagggcgccucugagccgu

SEQ ID NO: 4857 - RNA, 19 nt, Artificial Sequence
  Description of Artificial Sequence: Synthetic oligonucleotide
ccagggcgccucugagccg

SEQ ID NO: 4858 - RNA, 19 nt, Artificial Sequence
  Description of Artificial Sequence: Synthetic oligonucleotide
accagggcgccucugagcc

SEQ ID NO: 4859 - RNA, 19 nt, Artificial Sequence
  Description of Artificial Sequence: Synthetic oligonucleotide
caccagggcgccucugagc

SEQ ID NO: 4860 - RNA, 19 nt, Artificial Sequence
  Description of Artificial Sequence: Synthetic oligonucleotide
gcaccagggcgccucugag

SEQ ID NO: 4861 - RNA, 19 nt, Artificial Sequence
  Description of Artificial Sequence: Synthetic oligonucleotide
agcaccagggcgccucuga

SEQ ID NO: 4862 - RNA, 19 nt, Artificial Sequence
  Description of Artificial Sequence: Synthetic oligonucleotide
aagcaccagggcgccucug

SEQ ID NO: 4863 - RNA, 19 nt, Artificial Sequence
  Description of Artificial Sequence: Synthetic oligonucleotide
gaagcaccagggcgccucu

SEQ ID NO: 4864 - RNA, 19 nt, Artificial Sequence
  Description of Artificial Sequence: Synthetic oligonucleotide
ugaagcaccagggcgccuc

SEQ ID NO: 4865 - RNA, 19 nt, Artificial Sequence
  Description of Artificial Sequence: Synthetic oligonucleotide
gugaagcaccagggcgccu

SEQ ID NO: 4866 - RNA, 19 nt, Artificial Sequence
  Description of Artificial Sequence: Synthetic oligonucleotide
ugugaagcaccagggcgcc

SEQ ID NO: 4867 - RNA, 19 nt, Artificial Sequence
  Description of Artificial Sequence: Synthetic oligonucleotide
gugugaagcaccagggcgc

SEQ ID NO: 4868 - RNA, 19 nt, Artificial Sequence
  Description of Artificial Sequence: Synthetic oligonucleotide
agugugaagcaccagggcg

SEQ ID NO: 4869 - RNA, 19 nt, Artificial Sequence
  Description of Artificial Sequence: Synthetic oligonucleotide
cagugugaagcaccagggc

SEQ ID NO: 4870 - RNA, 19 nt, Artificial Sequence
  Description of Artificial Sequence: Synthetic oligonucleotide
gcagugugaagcaccaggg

SEQ ID NO: 4871 - RNA, 19 nt, Artificial Sequence
  Description of Artificial Sequence: Synthetic oligonucleotide
cgcagugugaagcaccagg

SEQ ID NO: 4872 - RNA, 19 nt, Artificial Sequence
  Description of Artificial Sequence: Synthetic oligonucleotide
ccgcagugugaagcaccag

SEQ ID NO: 4873 - RNA, 19 nt, Artificial Sequence
  Description of Artificial Sequence: Synthetic oligonucleotide
gccgcagugugaagcacca

SEQ ID NO: 4874 - RNA, 19 nt, Artificial Sequence
  Description of Artificial Sequence: Synthetic oligonucleotide
ggccgcagugugaagcacc

SEQ ID NO: 4875 - RNA, 19 nt, Artificial Sequence
  Description of Artificial Sequence: Synthetic oligonucleotide
gggccgcagugugaagcac

SEQ ID NO: 4876 - RNA, 19 nt, Artificial Sequence
  Description of Artificial Sequence: Synthetic oligonucleotide
cgggccgcagugugaagca

SEQ ID NO: 4877 - RNA, 19 nt, Artificial Sequence
  Description of Artificial Sequence: Synthetic oligonucleotide
ccgggccgcagugugaagc

SEQ ID NO: 4878 - RNA, 19 nt, Artificial Sequence
  Description of Artificial Sequence: Synthetic oligonucleotide
gccgggccgcagugugaag

SEQ ID NO: 4879 - RNA, 19 nt, Artificial Sequence
  Description of Artificial Sequence: Synthetic oligonucleotide
ugccgggccgcagugugaa

SEQ ID NO: 4880 - RNA, 19 nt, Artificial Sequence
  Description of Artificial Sequence: Synthetic oligonucleotide
augccgggccgcaguguga

SEQ ID NO: 4881 - RNA, 19 nt, Artificial Sequence
  Description of Artificial Sequence: Synthetic oligonucleotide
caugccgggccgcagugug

SEQ ID NO: 4882 - RNA, 19 nt, Artificial Sequence
  Description of Artificial Sequence: Synthetic oligonucleotide
gcaugccgggccgcagugu

SEQ ID NO: 4883 - RNA, 19 nt, Artificial Sequence
  Description of Artificial Sequence: Synthetic oligonucleotide
cgcaugccgggccgcagug

SEQ ID NO: 4884 - RNA, 19 nt, Artificial Sequence
  Description of Artificial Sequence: Synthetic oligonucleotide
gcgcaugccgggccgcagu

SEQ ID NO: 4885 - RNA, 19 nt, Artificial Sequence
  Description of Artificial Sequence: Synthetic oligonucleotide
cgcgcaugccgggccgcag

SEQ ID NO: 4886 - RNA, 19 nt, Artificial Sequence
  Description of Artificial Sequence: Synthetic oligonucleotide
gcgcgcaugccgggccgca

SEQ ID NO: 4887 - RNA, 19 nt, Artificial Sequence
  Description of Artificial Sequence: Synthetic oligonucleotide
cgcgcgcaugccgggccgc

SEQ ID NO: 4888 - RNA, 19 nt, Artificial Sequence
  Description of Artificial Sequence: Synthetic oligonucleotide
ccgcgcgcaugccgggccg

SEQ ID NO: 4889 - RNA, 19 nt, Artificial Sequence
  Description of Artificial Sequence: Synthetic oligonucleotide
gccgcgcgcaugccgggcc

SEQ ID NO: 4890 - RNA, 19 nt, Artificial Sequence
  Description of Artificial Sequence: Synthetic oligonucleotide
ggccgcgcgcaugccgggc

SEQ ID NO: 4891 - RNA, 19 nt, Artificial Sequence
  Description of Artificial Sequence: Synthetic oligonucleotide
aggccgcgcgcaugccggg

SEQ ID NO: 4892 - RNA, 19 nt, Artificial Sequence
  Description of Artificial Sequence: Synthetic oligonucleotide
aaggccgcgcgcaugccgg

SEQ ID NO: 4893 - RNA, 19 nt, Artificial Sequence
  Description of Artificial Sequence: Synthetic oligonucleotide
aaaggccgcgcgcaugccg

SEQ ID NO: 4894 - RNA, 19 nt, Artificial Sequence
  Description of Artificial Sequence: Synthetic oligonucleotide
aaaaggccgcgcgcaugcc

SEQ ID NO: 4895 - RNA, 19 nt, Artificial Sequence
  Description of Artificial Sequence: Synthetic oligonucleotide
caaaaggccgcgcgcaugc

SEQ ID NO: 4896 - RNA, 19 nt, Artificial Sequence
  Description of Artificial Sequence: Synthetic oligonucleotide
gcaaaaggccgcgcgcaug

SEQ ID NO: 4897 - RNA, 19 nt, Artificial Sequence
  Description of Artificial Sequence: Synthetic oligonucleotide
agcaaaaggccgcgcgcau

SEQ ID NO: 4898 - RNA, 19 nt, Artificial Sequence
  Description of Artificial Sequence: Synthetic oligonucleotide
uagcaaaaggccgcgcgca

SEQ ID NO: 4899 - RNA, 19 nt, Artificial Sequence
  Description of Artificial Sequence: Synthetic oligonucleotide
guagcaaaaggccgcgcgc

SEQ ID NO: 4900 - RNA, 19 nt, Artificial Sequence
  Description of Artificial Sequence: Synthetic oligonucleotide
gguagcaaaaggccgcgcg

SEQ ID NO: 4901 - RNA, 19 nt, Artificial Sequence
  Description of Artificial Sequence: Synthetic oligonucleotide
ugguagcaaaaggccgcgc

SEQ ID NO: 4902 - RNA, 19 nt, Artificial Sequence
  Description of Artificial Sequence: Synthetic oligonucleotide
cugguagcaaaaggccgcg

SEQ ID NO: 4903 - RNA, 19 nt, Artificial Sequence
  Description of Artificial Sequence: Synthetic oligonucleotide
ucugguagcaaaaggccgc

SEQ ID NO: 4904 - RNA, 19 nt, Artificial Sequence
  Description of Artificial Sequence: Synthetic oligonucleotide
aucugguagcaaaaggccg

SEQ ID NO: 4905 - RNA, 19 nt, Artificial Sequence
  Description of Artificial Sequence: Synthetic oligonucleotide
gaucugguagcaaaaggcc

SEQ ID NO: 4906 - RNA, 19 nt, Artificial Sequence
  Description of Artificial Sequence: Synthetic oligonucleotide
ggaucugguagcaaaaggc

SEQ ID NO: 4907 - RNA, 19 nt, Artificial Sequence
  Description of Artificial Sequence: Synthetic oligonucleotide
cggaucugguagcaaaagg

SEQ ID NO: 4908 - RNA, 19 nt, Artificial Sequence
  Description of Artificial Sequence: Synthetic oligonucleotide
ccggaucugguagcaaaag

SEQ ID NO: 4909 - RNA, 19 nt, Artificial Sequence
  Description of Artificial Sequence: Synthetic oligonucleotide
gccggaucugguagcaaaa

SEQ ID NO: 4910 - RNA, 19 nt, Artificial Sequence
  Description of Artificial Sequence: Synthetic oligonucleotide
cgccggaucugguagcaaa

SEQ ID NO: 4911 - RNA, 19 nt, Artificial Sequence
  Description of Artificial Sequence: Synthetic oligonucleotide
acgccggaucugguagcaa

SEQ ID NO: 4912 - RNA, 19 nt, Artificial Sequence
  Description of Artificial Sequence: Synthetic oligonucleotide
aacgccggaucugguagca

SEQ ID NO: 4913 - RNA, 19 nt, Artificial Sequence
  Description of Artificial Sequence: Synthetic oligonucleotide
caacgccggaucugguagc

SEQ ID NO: 4914 - RNA, 19 nt, Artificial Sequence
  Description of Artificial Sequence: Synthetic oligonucleotide
acaacgccggaucugguag

SEQ ID NO: 4915 - RNA, 19 nt, Artificial Sequence
  Description of Artificial Sequence: Synthetic oligonucleotide
uacaacgccggaucuggua

SEQ ID NO: 4916 - RNA, 19 nt, Artificial Sequence
  Description of Artificial Sequence: Synthetic oligonucleotide
guacaacgccggaucuggu

SEQ ID NO: 4917 - RNA, 19 nt, Artificial Sequence
  Description of Artificial Sequence: Synthetic oligonucleotide
uguacaacgccggaucugg

SEQ ID NO: 4918 - RNA, 19 nt, Artificial Sequence
  Description of Artificial Sequence: Synthetic oligonucleotide
cuguacaacgccggaucug

SEQ ID NO: 4919 - RNA, 19 nt, Artificial Sequence
  Description of Artificial Sequence: Synthetic oligonucleotide
ucuguacaacgccggaucu

SEQ ID NO: 4920 - RNA, 19 nt, Artificial Sequence
  Description of Artificial Sequence: Synthetic oligonucleotide
gucuguacaacgccggauc

SEQ ID NO: 4921 - RNA, 19 nt, Artificial Sequence
  Description of Artificial Sequence: Synthetic oligonucleotide
cgucuguacaacgccggau

SEQ ID NO: 4922 - RNA, 19 nt, Artificial Sequence
  Description of Artificial Sequence: Synthetic oligonucleotide
ucgucuguacaacgccgga

SEQ ID NO: 4923 - RNA, 19 nt, Artificial Sequence
  Description of Artificial Sequence: Synthetic oligonucleotide
gucgucuguacaacgccgg

SEQ ID NO: 4924 - RNA, 19 nt, Artificial Sequence
  Description of Artificial Sequence: Synthetic oligonucleotide
cgucgucuguacaacgccg

SEQ ID NO: 4925 - RNA, 19 nt, Artificial Sequence
  Description of Artificial Sequence: Synthetic oligonucleotide
acgucgucuguacaacgcc

SEQ ID NO: 4926 - RNA, 19 nt, Artificial Sequence
  Description of Artificial Sequence: Synthetic oligonucleotide
cacgucgucuguacaacgc

SEQ ID NO: 4927 - RNA, 19 nt, Artificial Sequence
  Description of Artificial Sequence: Synthetic oligonucleotide
gcacgucgucuguacaacg

SEQ ID NO: 4928 - RNA, 19 nt, Artificial Sequence
  Description of Artificial Sequence: Synthetic oligonucleotide
cgcacgucgucuguacaac

SEQ ID NO: 4929 - RNA, 19 nt, Artificial Sequence
  Description of Artificial Sequence: Synthetic oligonucleotide
ccgcacgucgucuguacaa

SEQ ID NO: 4930 - RNA, 19 nt, Artificial Sequence
  Description of Artificial Sequence: Synthetic oligonucleotide
gccgcacgucgucuguaca

SEQ ID NO: 4931 - RNA, 19 nt, Artificial Sequence
  Description of Artificial Sequence: Synthetic oligonucleotide
ggccgcacgucgucuguac

SEQ ID NO: 4932 - RNA, 19 nt, Artificial Sequence
  Description of Artificial Sequence: Synthetic oligonucleotide
gggccgcacgucgucugua

SEQ ID NO: 4933 - RNA, 19 nt, Artificial Sequence
  Description of Artificial Sequence: Synthetic oligonucleotide
ggggccgcacgucgucugu

SEQ ID NO: 4934 - RNA, 19 nt, Artificial Sequence
  Description of Artificial Sequence: Synthetic oligonucleotide
uggggccgcacgucgucug

SEQ ID NO: 4935 - RNA, 19 nt, Artificial Sequence
  Description of Artificial Sequence: Synthetic oligonucleotide
cuggggccgcacgucgucu

SEQ ID NO: 4936 - RNA, 19 nt, Artificial Sequence
  Description of Artificial Sequence: Synthetic oligonucleotide
ccuggggccgcacgucguc

SEQ ID NO: 4937 - RNA, 19 nt, Artificial Sequence
  Description of Artificial Sequence: Synthetic oligonucleotide
uccuggggccgcacgucgu

SEQ ID NO: 4938 - RNA, 19 nt, Artificial Sequence
  Description of Artificial Sequence: Synthetic oligonucleotide
guccuggggccgcacgucg

SEQ ID NO: 4939 - RNA, 19 nt, Artificial Sequence
  Description of Artificial Sequence: Synthetic oligonucleotide
aguccuggggccgcacguc

SEQ ID NO: 4940 - RNA, 19 nt, Artificial Sequence
  Description of Artificial Sequence: Synthetic oligonucleotide
caguccuggggccgcacgu

SEQ ID NO: 4941 - RNA, 19 nt, Artificial Sequence
  Description of Artificial Sequence: Synthetic oligonucleotide
gcaguccuggggccgcacg

SEQ ID NO: 4942 - RNA, 19 nt, Artificial Sequence
  Description of Artificial Sequence: Synthetic oligonucleotide
agcaguccuggggccgcac

SEQ ID NO: 4943 - RNA, 19 nt, Artificial Sequence
  Description of Artificial Sequence: Synthetic oligonucleotide
uagcaguccuggggccgca

SEQ ID NO: 4944 - RNA, 19 nt, Artificial Sequence
  Description of Artificial Sequence: Synthetic oligonucleotide
guagcaguccuggggccgc

SEQ ID NO: 4945 - RNA, 19 nt, Artificial Sequence
  Description of Artificial Sequence: Synthetic oligonucleotide
gguagcaguccuggggccg

SEQ ID NO: 4946 - RNA, 19 nt, Artificial Sequence
  Description of Artificial Sequence: Synthetic oligonucleotide
ugguagcaguccuggggcc

SEQ ID NO: 4947 - RNA, 19 nt, Artificial Sequence
  Description of Artificial Sequence: Synthetic oligonucleotide
gugguagcaguccuggggc

SEQ ID NO: 4948 - RNA, 19 nt, Artificial Sequence
  Description of Artificial Sequence: Synthetic oligonucleotide
cgugguagcaguccugggg

SEQ ID NO: 4949 - RNA, 19 nt, Artificial Sequence
  Description of Artificial Sequence: Synthetic oligonucleotide
ccgugguagcaguccuggg

SEQ ID NO: 4950 - RNA, 19 nt, Artificial Sequence
  Description of Artificial Sequence: Synthetic oligonucleotide
gccgugguagcaguccugg

SEQ ID NO: 4951 - RNA, 19 nt, Artificial Sequence
  Description of Artificial Sequence: Synthetic oligonucleotide
cgccgugguagcaguccug

SEQ ID NO: 4952 - RNA, 19 nt, Artificial Sequence
  Description of Artificial Sequence: Synthetic oligonucleotide
gcgccgugguagcaguccu

SEQ ID NO: 4953 - RNA, 19 nt, Artificial Sequence
  Description of Artificial Sequence: Synthetic oligonucleotide
ugcgccgugguagcagucc

SEQ ID NO: 4954 - RNA, 19 nt, Artificial Sequence
  Description of Artificial Sequence: Synthetic oligonucleotide
cugcgccgugguagcaguc

SEQ ID NO: 4955 - RNA, 19 nt, Artificial Sequence
  Description of Artificial Sequence: Synthetic oligonucleotide
ccugcgccgugguagcagu

SEQ ID NO: 4956 - RNA, 19 nt, Artificial Sequence
  Description of Artificial Sequence: Synthetic oligonucleotide
cccugcgccgugguagcag

SEQ ID NO: 4957 - RNA, 19 nt, Artificial Sequence
  Description of Artificial Sequence: Synthetic oligonucleotide
ccccugcgccgugguagca

SEQ ID NO: 4958 - RNA, 19 nt, Artificial Sequence
  Description of Artificial Sequence: Synthetic oligonucleotide
uccccugcgccgugguagc

SEQ ID NO: 4959 - RNA, 19 nt, Artificial Sequence
  Description of Artificial Sequence: Synthetic oligonucleotide
cuccccugcgccgugguag

SEQ ID NO: 4960 - RNA, 19 nt, Artificial Sequence
  Description of Artificial Sequence: Synthetic oligonucleotide
gcuccccugcgccguggua

SEQ ID NO: 4961 - RNA, 19 nt, Artificial Sequence
  Description of Artificial Sequence: Synthetic oligonucleotide
ugcuccccugcgccguggu

SEQ ID NO: 4962 - RNA, 19 nt, Artificial Sequence
  Description of Artificial Sequence: Synthetic oligonucleotide
cugcuccccugcgccgugg

SEQ ID NO: 4963 - RNA, 19 nt, Artificial Sequence
  Description of Artificial Sequence: Synthetic oligonucleotide
acugcuccccugcgccgug

SEQ ID NO: 4964 - RNA, 19 nt, Artificial Sequence
  Description of Artificial Sequence: Synthetic oligonucleotide
uacugcuccccugcgccgu

SEQ ID NO: 4965 - RNA, 19 nt, Artificial Sequence
  Description of Artificial Sequence: Synthetic oligonucleotide
guacugcuccccugcgccg

SEQ ID NO: 4966 - RNA, 19 nt, Artificial Sequence
  Description of Artificial Sequence: Synthetic oligonucleotide
gguacugcuccccugcgcc

SEQ ID NO: 4967 - RNA, 19 nt, Artificial Sequence
  Description of Artificial Sequence: Synthetic oligonucleotide
cgguacugcuccccugcgc

SEQ ID NO: 4968 - RNA, 19 nt, Artificial Sequence
  Description of Artificial Sequence: Synthetic oligonucleotide
gcgguacugcuccccugcg

SEQ ID NO: 4969 - RNA, 19 nt, Artificial Sequence
  Description of Artificial Sequence: Synthetic oligonucleotide
cgcgguacugcuccccugc

SEQ ID NO: 4970 - RNA, 19 nt, Artificial Sequence
  Description of Artificial Sequence: Synthetic oligonucleotide
ccgcgguacugcuccccug

SEQ ID NO: 4971 - RNA, 19 nt, Artificial Sequence
  Description of Artificial Sequence: Synthetic oligonucleotide
gccgcgguacugcuccccu

SEQ ID NO: 4972 - RNA, 19 nt, Artificial Sequence
  Description of Artificial Sequence: Synthetic oligonucleotide
ugccgcgguacugcucccc

SEQ ID NO: 4973 - RNA, 19 nt, Artificial Sequence
  Description of Artificial Sequence: Synthetic oligonucleotide
gugccgcgguacugcuccc

SEQ ID NO: 4974 - RNA, 19 nt, Artificial Sequence
  Description of Artificial Sequence: Synthetic oligonucleotide
cgugccgcgguacugcucc

SEQ ID NO: 4975 - RNA, 19 nt, Artificial Sequence
  Description of Artificial Sequence: Synthetic oligonucleotide
ccgugccgcgguacugcuc

SEQ ID NO: 4976 - RNA, 19 nt, Artificial Sequence
  Description of Artificial Sequence: Synthetic oligonucleotide
accgugccgcgguacugcu

SEQ ID NO: 4977 - RNA, 19 nt, Artificial Sequence
  Description of Artificial Sequence: Synthetic oligonucleotide
gaccgugccgcgguacugc

SEQ ID NO: 4978 - RNA, 19 nt, Artificial Sequence
  Description of Artificial Sequence: Synthetic oligonucleotide
ugaccgugccgcgguacug

SEQ ID NO: 4979 - RNA, 19 nt, Artificial Sequence
  Description of Artificial Sequence: Synthetic oligonucleotide
cugaccgugccgcgguacu

SEQ ID NO: 4980 - RNA, 19 nt, Artificial Sequence
  Description of Artificial Sequence: Synthetic oligonucleotide
gcugaccgugccgcgguac

SEQ ID NO: 4981 - RNA, 19 nt, Artificial Sequence
  Description of Artificial Sequence: Synthetic oligonucleotide
ugcugaccgugccgcggua

SEQ ID NO: 4982 - RNA, 19 nt, Artificial Sequence
  Description of Artificial Sequence: Synthetic oligonucleotide
uugcugaccgugccgcggu

SEQ ID NO: 4983 - RNA, 19 nt, Artificial Sequence
  Description of Artificial Sequence: Synthetic oligonucleotide
cuugcugaccgugccgcgg

SEQ ID NO: 4984 - RNA, 19 nt, Artificial Sequence
  Description of Artificial Sequence: Synthetic oligonucleotide
ucuugcugaccgugccgcg

SEQ ID NO: 4985 - RNA, 19 nt, Artificial Sequence
  Description of Artificial Sequence: Synthetic oligonucleotide
gucuugcugaccgugccgc

SEQ ID NO: 4986 - RNA, 19 nt, Artificial Sequence
  Description of Artificial Sequence: Synthetic oligonucleotide
ggucuugcugaccgugccg

SEQ ID NO: 4987 - RNA, 19 nt, Artificial Sequence
  Description of Artificial Sequence: Synthetic oligonucleotide
gggucuugcugaccgugcc

SEQ ID NO: 4988 - RNA, 19 nt, Artificial Sequence
  Description of Artificial Sequence: Synthetic oligonucleotide
cgggucuugcugaccgugc

SEQ ID NO: 4989 - RNA, 19 nt, Artificial Sequence
  Description of Artificial Sequence: Synthetic oligonucleotide
gcgggucuugcugaccgug

SEQ ID NO: 4990 - RNA, 19 nt, Artificial Sequence
  Description of Artificial Sequence: Synthetic oligonucleotide
ugcgggucuugcugaccgu

SEQ ID NO: 4991 - RNA, 19 nt, Artificial Sequence
  Description of Artificial Sequence: Synthetic oligonucleotide
uugcgggucuugcugaccg

SEQ ID NO: 4992 - RNA, 19 nt, Artificial Sequence
  Description of Artificial Sequence: Synthetic oligonucleotide
cuugcgggucuugcugacc

SEQ ID NO: 4993 - RNA, 19 nt, Artificial Sequence
  Description of Artificial Sequence: Synthetic oligonucleotide
ccuugcgggucuugcugac

SEQ ID NO: 4994 - RNA, 19 nt, Artificial Sequence
  Description of Artificial Sequence: Synthetic oligonucleotide
cccuugcgggucuugcuga

SEQ ID NO: 4995 - RNA, 19 nt, Artificial Sequence
  Description of Artificial Sequence: Synthetic oligonucleotide
acccuugcgggucuugcug

SEQ ID NO: 4996 - RNA, 19 nt, Artificial Sequence
  Description of Artificial Sequence: Synthetic oligonucleotide
cacccuugcgggucuugcu

SEQ ID NO: 4997 - RNA, 19 nt, Artificial Sequence
  Description of Artificial Sequence: Synthetic oligonucleotide
acacccuugcgggucuugc

SEQ ID NO: 4998 - RNA, 19 nt, Artificial Sequence
  Description of Artificial Sequence: Synthetic oligonucleotide
gacacccuugcgggucuug

SEQ ID NO: 4999 - RNA, 19 nt, Artificial Sequence
  Description of Artificial Sequence: Synthetic oligonucleotide
ggacacccuugcgggucuu

SEQ ID NO: 5000 - RNA, 19 nt, Artificial Sequence
  Description of Artificial Sequence: Synthetic oligonucleotide
uggacacccuugcgggucu

SEQ ID NO: 5001 - RNA, 19 nt, Artificial Sequence
  Description of Artificial Sequence: Synthetic oligonucleotide
cuggacacccuugcggguc

SEQ ID NO: 5002 - RNA, 19 nt, Artificial Sequence
  Description of Artificial Sequence: Synthetic oligonucleotide
acuggacacccuugcgggu

SEQ ID NO: 5003 - RNA, 19 nt, Artificial Sequence
  Description of Artificial Sequence: Synthetic oligonucleotide
cacuggacacccuugcggg

SEQ ID NO: 5004 - RNA, 19 nt, Artificial Sequence
  Description of Artificial Sequence: Synthetic oligonucleotide
gcacuggacacccuugcgg

SEQ ID NO: 5005 - RNA, 19 nt, Artificial Sequence
  Description of Artificial Sequence: Synthetic oligonucleotide
ggcacuggacacccuugcg

SEQ ID NO: 5006 - RNA, 19 nt, Artificial Sequence
  Description of Artificial Sequence: Synthetic oligonucleotide
uggcacuggacacccuugc

SEQ ID NO: 5007 - RNA, 19 nt, Artificial Sequence
  Description of Artificial Sequence: Synthetic oligonucleotide
cuggcacuggacacccuug

SEQ ID NO: 5008 - RNA, 19 nt, Artificial Sequence
  Description of Artificial Sequence: Synthetic oligonucleotide
gcuggcacuggacacccuu

SEQ ID NO: 5009 - RNA, 19 nt, Artificial Sequence
  Description of Artificial Sequence: Synthetic oligonucleotide
cgcuggcacuggacacccu

SEQ ID NO: 5010 - RNA, 19 nt, Artificial Sequence
  Description of Artificial Sequence: Synthetic oligonucleotide
gcgcuggcacuggacaccc

SEQ ID NO: 5011 - RNA, 19 nt, Artificial Sequence
  Description of Artificial Sequence: Synthetic oligonucleotide
agcgcuggcacuggacacc

SEQ ID NO: 5012 - RNA, 19 nt, Artificial Sequence
  Description of Artificial Sequence: Synthetic oligonucleotide
cagcgcuggcacuggacac

SEQ ID NO: 5013 - RNA, 19 nt, Artificial Sequence
  Description of Artificial Sequence: Synthetic oligonucleotide
ccagcgcuggcacuggaca

SEQ ID NO: 5014 - RNA, 19 nt, Artificial Sequence
  Description of Artificial Sequence: Synthetic oligonucleotide
accagcgcuggcacuggac

SEQ ID NO: 5015 - RNA, 19 nt, Artificial Sequence
  Description of Artificial Sequence: Synthetic oligonucleotide
gaccagcgcuggcacugga

SEQ ID NO: 5016 - RNA, 19 nt, Artificial Sequence
  Description of Artificial Sequence: Synthetic oligonucleotide
ggaccagcgcuggcacugg

SEQ ID NO: 5017 - RNA, 19 nt, Artificial Sequence
  Description of Artificial Sequence: Synthetic oligonucleotide
cggaccagcgcuggcacug

SEQ ID NO: 5018 - RNA, 19 nt, Artificial Sequence
  Description of Artificial Sequence: Synthetic oligonucleotide
gcggaccagcgcuggcacu

SEQ ID NO: 5019 - RNA, 19 nt, Artificial Sequence
  Description of Artificial Sequence: Synthetic oligonucleotide
agcggaccagcgcuggcac

SEQ ID NO: 5020 - RNA, 19 nt, Artificial Sequence
  Description of Artificial Sequence: Synthetic oligonucleotide
cagcggaccagcgcuggca

SEQ ID NO: 5021 - RNA, 19 nt, Artificial Sequence
  Description of Artificial Sequence: Synthetic oligonucleotide
ucagcggaccagcgcuggc

SEQ ID NO: 5022 - RNA, 19 nt, Artificial Sequence
  Description of Artificial Sequence: Synthetic oligonucleotide
cucagcggaccagcgcugg

SEQ ID NO: 5023 - RNA, 19 nt, Artificial Sequence
  Description of Artificial Sequence: Synthetic oligonucleotide
ucucagcggaccagcgcug

SEQ ID NO: 5024 - RNA, 19 nt, Artificial Sequence
  Description of Artificial Sequence: Synthetic oligonucleotide
gucucagcggaccagcgcu

SEQ ID NO: 5025 - RNA, 19 nt, Artificial Sequence
  Description of Artificial Sequence: Synthetic oligonucleotide
cgucucagcggaccagcgc

SEQ ID NO: 5026 - RNA, 19 nt, Artificial Sequence
  Description of Artificial Sequence: Synthetic oligonucleotide
gcgucucagcggaccagcg

SEQ ID NO: 5027 - RNA, 19 nt, Artificial Sequence
  Description of Artificial Sequence: Synthetic oligonucleotide
ggcgucucagcggaccagc

SEQ ID NO: 5028 - RNA, 19 nt, Artificial Sequence
  Description of Artificial Sequence: Synthetic oligonucleotide
cggcgucucagcggaccag

SEQ ID NO: 5029 - RNA, 19 nt, Artificial Sequence
  Description of Artificial Sequence: Synthetic oligonucleotide
gcggcgucucagcggacca

SEQ ID NO: 5030 - RNA, 19 nt, Artificial Sequence
  Description of Artificial Sequence: Synthetic oligonucleotide
ugcggcgucucagcggacc

SEQ ID NO: 5031 - RNA, 19 nt, Artificial Sequence
  Description of Artificial Sequence: Synthetic oligonucleotide
gugcggcgucucagcggac

SEQ ID NO: 5032 - RNA, 19 nt, Artificial Sequence
  Description of Artificial Sequence: Synthetic oligonucleotide
ugugcggcgucucagcgga

SEQ ID NO: 5033 - RNA, 19 nt, Artificial Sequence
  Description of Artificial Sequence: Synthetic oligonucleotide
uugugcggcgucucagcgg

SEQ ID NO: 5034 - RNA, 19 nt, Artificial Sequence
  Description of Artificial Sequence: Synthetic oligonucleotide
cuugugcggcgucucagcg

SEQ ID NO: 5035 - RNA, 19 nt, Artificial Sequence
  Description of Artificial Sequence: Synthetic oligonucleotide
gcuugugcggcgucucagc

SEQ ID NO: 5036 - RNA, 19 nt, Artificial Sequence
  Description of Artificial Sequence: Synthetic oligonucleotide
ggcuugugcggcgucucag

SEQ ID NO: 5037 - RNA, 19 nt, Artificial Sequence
  Description of Artificial Sequence: Synthetic oligonucleotide
cggcuugugcggcgucuca

SEQ ID NO: 5038 - RNA, 19 nt, Artificial Sequence
  Description of Artificial Sequence: Synthetic oligonucleotide
gcggcuugugcggcgucuc

SEQ ID NO: 5039 - RNA, 19 nt, Artificial Sequence
  Description of Artificial Sequence: Synthetic oligonucleotide
ugcggcuugugcggcgucu

SEQ ID NO: 5040 - RNA, 19 nt, Artificial Sequence
  Description of Artificial Sequence: Synthetic oligonucleotide
cugcggcuugugcggcguc

SEQ ID NO: 5041 - RNA, 19 nt, Artificial Sequence
  Description of Artificial Sequence: Synthetic oligonucleotide
acugcggcuugugcggcgu

SEQ ID NO: 5042 - RNA, 19 nt, Artificial Sequence
  Description of Artificial Sequence: Synthetic oligonucleotide
aacugcggcuugugcggcg

SEQ ID NO: 5043 - RNA, 19 nt, Artificial Sequence
  Description of Artificial Sequence: Synthetic oligonucleotide
gaacugcggcuugugcggc

SEQ ID NO: 5044 - RNA, 19 nt, Artificial Sequence
  Description of Artificial Sequence: Synthetic oligonucleotide
ugaacugcggcuugugcgg

SEQ ID NO: 5045 - RNA, 19 nt, Artificial Sequence
  Description of Artificial Sequence: Synthetic oligonucleotide
gugaacugcggcuugugcg

SEQ ID NO: 5046 - RNA, 19 nt, Artificial Sequence
  Description of Artificial Sequence: Synthetic oligonucleotide
cgugaacugcggcuugugc

SEQ ID NO: 5047 - RNA, 19 nt, Artificial Sequence
  Description of Artificial Sequence: Synthetic oligonucleotide
acgugaacugcggcuugug

SEQ ID NO: 5048 - RNA, 19 nt, Artificial Sequence
  Description of Artificial Sequence: Synthetic oligonucleotide
aacgugaacugcggcuugu

SEQ ID NO: 5049 - RNA, 19 nt, Artificial Sequence
  Description of Artificial Sequence: Synthetic oligonucleotide
aaacgugaacugcggcuug

SEQ ID NO: 5050 - RNA, 19 nt, Artificial Sequence
  Description of Artificial Sequence: Synthetic oligonucleotide
uaaacgugaacugcggcuu

SEQ ID NO: 5051 - RNA, 19 nt, Artificial Sequence
  Description of Artificial Sequence: Synthetic oligonucleotide
guaaacgugaacugcggcu

SEQ ID NO: 5052 - RNA, 19 nt, Artificial Sequence
  Description of Artificial Sequence: Synthetic oligonucleotide
gguaaacgugaacugcggc

SEQ ID NO: 5053 - RNA, 19 nt, Artificial Sequence
  Description of Artificial Sequence: Synthetic oligonucleotide
agguaaacgugaacugcgg

SEQ ID NO: 5054 - RNA, 19 nt, Artificial Sequence
  Description of Artificial Sequence: Synthetic oligonucleotide
gagguaaacgugaacugcg

SEQ ID NO: 5055 - RNA, 19 nt, Artificial Sequence
  Description of Artificial Sequence: Synthetic oligonucleotide
ggagguaaacgugaacugc

SEQ ID NO: 5056 - RNA, 19 nt, Artificial Sequence
  Description of Artificial Sequence: Synthetic oligonucleotide
cggagguaaacgugaacug

SEQ ID NO: 5057 - RNA, 19 nt, Artificial Sequence
  Description of Artificial Sequence: Synthetic oligonucleotide
ucggagguaaacgugaacu

SEQ ID NO: 5058 - RNA, 19 nt, Artificial Sequence
  Description of Artificial Sequence: Synthetic oligonucleotide
uucggagguaaacgugaac

SEQ ID NO: 5059 - RNA, 19 nt, Artificial Sequence
  Description of Artificial Sequence: Synthetic oligonucleotide
guucggagguaaacgugaa

SEQ ID NO: 5060 - RNA, 19 nt, Artificial Sequence
  Description of Artificial Sequence: Synthetic oligonucleotide
gguucggagguaaacguga

SEQ ID NO: 5061 - RNA, 19 nt, Artificial Sequence
  Description of Artificial Sequence: Synthetic oligonucleotide
cgguucggagguaaacgug

SEQ ID NO: 5062 - RNA, 19 nt, Artificial Sequence
  Description of Artificial Sequence: Synthetic oligonucleotide
gcgguucggagguaaacgu

SEQ ID NO: 5063 - RNA, 19 nt, Artificial Sequence
  Description of Artificial Sequence: Synthetic oligonucleotide
ugcgguucggagguaaacg

SEQ ID NO: 5064 - RNA, 19 nt, Artificial Sequence
  Description of Artificial Sequence: Synthetic oligonucleotide
augcgguucggagguaaac

SEQ ID NO: 5065 - RNA, 19 nt, Artificial Sequence
  Description of Artificial Sequence: Synthetic oligonucleotide
caugcgguucggagguaaa

SEQ ID NO: 5066 - RNA, 19 nt, Artificial Sequence
  Description of Artificial Sequence: Synthetic oligonucleotide
gcaugcgguucggagguaa

SEQ ID NO: 5067 - RNA, 19 nt, Artificial Sequence
  Description of Artificial Sequence: Synthetic oligonucleotide
ugcaugcgguucggaggua

SEQ ID NO: 5068 - RNA, 19 nt, Artificial Sequence
  Description of Artificial Sequence: Synthetic oligonucleotide
gugcaugcgguucggaggu

SEQ ID NO: 5069 - RNA, 19 nt, Artificial Sequence
  Description of Artificial Sequence: Synthetic oligonucleotide
ugugcaugcgguucggagg

SEQ ID NO: 5070 - RNA, 19 nt, Artificial Sequence
  Description of Artificial Sequence: Synthetic oligonucleotide
uugugcaugcgguucggag

SEQ ID NO: 5071 - RNA, 19 nt, Artificial Sequence
  Description of Artificial Sequence: Synthetic oligonucleotide
guugugcaugcgguucgga

SEQ ID NO: 5072 - RNA, 19 nt, Artificial Sequence
  Description of Artificial Sequence: Synthetic oligonucleotide
aguugugcaugcgguucgg

SEQ ID NO: 5073 - RNA, 19 nt, Artificial Sequence
  Description of Artificial Sequence: Synthetic oligonucleotide
caguugugcaugcgguucg

SEQ ID NO: 5074 - RNA, 19 nt, Artificial Sequence
  Description of Artificial Sequence: Synthetic oligonucleotide
ccaguugugcaugcgguuc

SEQ ID NO: 5075 - RNA, 19 nt, Artificial Sequence
  Description of Artificial Sequence: Synthetic oligonucleotide
uccaguugugcaugcgguu

SEQ ID NO: 5076 - RNA, 19 nt, Artificial Sequence
  Description of Artificial Sequence: Synthetic oligonucleotide
cuccaguugugcaugcggu

SEQ ID NO: 5077 - RNA, 19 nt, Artificial Sequence
  Description of Artificial Sequence: Synthetic oligonucleotide
ccuccaguugugcaugcgg

SEQ ID NO: 5078 - RNA, 19 nt, Artificial Sequence
  Description of Artificial Sequence: Synthetic oligonucleotide
uccuccaguugugcaugcg

SEQ ID NO: 5079 - RNA, 19 nt, Artificial Sequence
  Description of Artificial Sequence: Synthetic oligonucleotide
cuccuccaguugugcaugc

SEQ ID NO: 5080 - RNA, 19 nt, Artificial Sequence
  Description of Artificial Sequence: Synthetic oligonucleotide
ucuccuccaguugugcaug

SEQ ID NO: 5081 - RNA, 19 nt, Artificial Sequence
  Description of Artificial Sequence: Synthetic oligonucleotide
uucuccuccaguugugcau

SEQ ID NO: 5082 - RNA, 19 nt, Artificial Sequence
  Description of Artificial Sequence: Synthetic oligonucleotide
guucuccuccaguugugca

SEQ ID NO: 5083 - RNA, 19 nt, Artificial Sequence
  Description of Artificial Sequence: Synthetic oligonucleotide
aguucuccuccaguugugc

SEQ ID NO: 5084 - RNA, 19 nt, Artificial Sequence
  Description of Artificial Sequence: Synthetic oligonucleotide
aaguucuccuccaguugug

SEQ ID NO: 5085 - RNA, 19 nt, Artificial Sequence
  Description of Artificial Sequence: Synthetic oligonucleotide
gaaguucuccuccaguugu

SEQ ID NO: 5086 - RNA, 19 nt, Artificial Sequence
  Description of Artificial Sequence: Synthetic oligonucleotide
agaaguucuccuccaguug

SEQ ID NO: 5087 - RNA, 19 nt, Artificial Sequence
  Description of Artificial Sequence: Synthetic oligonucleotide
cagaaguucuccuccaguu

SEQ ID NO: 5088 - RNA, 19 nt, Artificial Sequence
  Description of Artificial Sequence: Synthetic oligonucleotide
gcagaaguucuccuccagu

SEQ ID NO: 5089 - RNA, 19 nt, Artificial Sequence
  Description of Artificial Sequence: Synthetic oligonucleotide
ggcagaaguucuccuccag

SEQ ID NO: 5090 - RNA, 19 nt, Artificial Sequence
  Description of Artificial Sequence: Synthetic oligonucleotide
cggcagaaguucuccucca

SEQ ID NO: 5091 - RNA, 19 nt, Artificial Sequence
  Description of Artificial Sequence: Synthetic oligonucleotide
ccggcagaaguucuccucc

SEQ ID NO: 5092 - RNA, 19 nt, Artificial Sequence
  Description of Artificial Sequence: Synthetic oligonucleotide
uccggcagaaguucuccuc

SEQ ID NO: 5093 - RNA, 19 nt, Artificial Sequence
  Description of Artificial Sequence: Synthetic oligonucleotide
uuccggcagaaguucuccu

SEQ ID NO: 5094 - RNA, 19 nt, Artificial Sequence
  Description of Artificial Sequence: Synthetic oligonucleotide
guuccggcagaaguucucc

SEQ ID NO: 5095 - RNA, 19 nt, Artificial Sequence
  Description of Artificial Sequence: Synthetic oligonucleotide
gguuccggcagaaguucuc

SEQ ID NO: 5096 - RNA, 19 nt, Artificial Sequence
  Description of Artificial Sequence: Synthetic oligonucleotide
ggguuccggcagaaguucu

SEQ ID NO: 5097 - RNA, 19 nt, Artificial Sequence
  Description of Artificial Sequence: Synthetic oligonucleotide
uggguuccggcagaaguuc

SEQ ID NO: 5098 - RNA, 19 nt, Artificial Sequence
  Description of Artificial Sequence: Synthetic oligonucleotide
cuggguuccggcagaaguu

SEQ ID NO: 5099 - RNA, 19 nt, Artificial Sequence
  Description of Artificial Sequence: Synthetic oligonucleotide
ucuggguuccggcagaagu

SEQ ID NO: 5100 - RNA, 19 nt, Artificial Sequence
  Description of Artificial Sequence: Synthetic oligonucleotide
aucuggguuccggcagaag

SEQ ID NO: 5101 - RNA, 19 nt, Artificial Sequence
  Description of Artificial Sequence: Synthetic oligonucleotide
caucuggguuccggcagaa

SEQ ID NO: 5102 - RNA, 19 nt, Artificial Sequence
  Description of Artificial Sequence: Synthetic oligonucleotide
ccaucuggguuccggcaga

SEQ ID NO: 5103 - RNA, 19 nt, Artificial Sequence
  Description of Artificial Sequence: Synthetic oligonucleotide
cccaucuggguuccggcag

SEQ ID NO: 5104 - RNA, 19 nt, Artificial Sequence
  Description of Artificial Sequence: Synthetic oligonucleotide
ccccaucuggguuccggca

SEQ ID NO: 5105 - RNA, 19 nt, Artificial Sequence
  Description of Artificial Sequence: Synthetic oligonucleotide
uccccaucuggguuccggc

SEQ ID NO: 5106 - RNA, 19 nt, Artificial Sequence
  Description of Artificial Sequence: Synthetic oligonucleotide
auccccaucuggguuccgg

SEQ ID NO: 5107 - RNA, 19 nt, Artificial Sequence
  Description of Artificial Sequence: Synthetic oligonucleotide
uauccccaucuggguuccg

SEQ ID NO: 5108 - RNA, 19 nt, Artificial Sequence
  Description of Artificial Sequence: Synthetic oligonucleotide
cuauccccaucuggguucc

SEQ ID NO: 5109 - RNA, 19 nt, Artificial Sequence
  Description of Artificial Sequence: Synthetic oligonucleotide
gcuauccccaucuggguuc

SEQ ID NO: 5110 - RNA, 19 nt, Artificial Sequence
  Description of Artificial Sequence: Synthetic oligonucleotide
ggcuauccccaucuggguu

SEQ ID NO: 5111 - RNA, 19 nt, Artificial Sequence
  Description of Artificial Sequence: Synthetic oligonucleotide
uggcuauccccaucugggu

SEQ ID NO: 5112 - RNA, 19 nt, Artificial Sequence
  Description of Artificial Sequence: Synthetic oligonucleotide
auggcuauccccaucuggg

SEQ ID NO: 5113 - RNA, 19 nt, Artificial Sequence
  Description of Artificial Sequence: Synthetic oligonucleotide
cauggcuauccccaucugg

SEQ ID NO: 5114 - RNA, 19 nt, Artificial Sequence
  Description of Artificial Sequence: Synthetic oligonucleotide
ccauggcuauccccaucug

SEQ ID NO: 5115 - RNA, 19 nt, Artificial Sequence
  Description of Artificial Sequence: Synthetic oligonucleotide
cccauggcuauccccaucu

SEQ ID NO: 5116 - RNA, 19 nt, Artificial Sequence
  Description of Artificial Sequence: Synthetic oligonucleotide
gcccauggcuauccccauc

SEQ ID NO: 5117 - RNA, 19 nt, Artificial Sequence
  Description of Artificial Sequence: Synthetic oligonucleotide
ggcccauggcuauccccau

SEQ ID NO: 5118 - RNA, 19 nt, Artificial Sequence
  Description of Artificial Sequence: Synthetic oligonucleotide
gggcccauggcuaucccca

SEQ ID NO: 5119 - RNA, 19 nt, Artificial Sequence
  Description of Artificial Sequence: Synthetic oligonucleotide
agggcccauggcuaucccc

SEQ ID NO: 5120 - RNA, 19 nt, Artificial Sequence
  Description of Artificial Sequence: Synthetic oligonucleotide
cagggcccauggcuauccc

SEQ ID NO: 5121 - RNA, 19 nt, Artificial Sequence
  Description of Artificial Sequence: Synthetic oligonucleotide
ccagggcccauggcuaucc

SEQ ID NO: 5122 - RNA, 19 nt, Artificial Sequence
  Description of Artificial Sequence: Synthetic oligonucleotide
accagggcccauggcuauc

SEQ ID NO: 5123 - RNA, 19 nt, Artificial Sequence
  Description of Artificial Sequence: Synthetic oligonucleotide
caccagggcccauggcuau

SEQ ID NO: 5124 - RNA, 19 nt, Artificial Sequence
  Description of Artificial Sequence: Synthetic oligonucleotide
gcaccagggcccauggcua

SEQ ID NO: 5125 - RNA, 19 nt, Artificial Sequence
  Description of Artificial Sequence: Synthetic oligonucleotide
agcaccagggcccauggcu

SEQ ID NO: 5126 - RNA, 19 nt, Artificial Sequence
  Description of Artificial Sequence: Synthetic oligonucleotide
uagcaccagggcccauggc

SEQ ID NO: 5127 - RNA, 19 nt, Artificial Sequence
  Description of Artificial Sequence: Synthetic oligonucleotide
guagcaccagggcccaugg

SEQ ID NO: 5128 - RNA, 19 nt, Artificial Sequence
  Description of Artificial Sequence: Synthetic oligonucleotide
uguagcaccagggcccaug

SEQ ID NO: 5129 - RNA, 19 nt, Artificial Sequence
  Description of Artificial Sequence: Synthetic oligonucleotide
guguagcaccagggcccau

SEQ ID NO: 5130 - RNA, 19 nt, Artificial Sequence
  Description of Artificial Sequence: Synthetic oligonucleotide
cguguagcaccagggccca

SEQ ID NO: 5131 - RNA, 19 nt, Artificial Sequence
  Description of Artificial Sequence: Synthetic oligonucleotide
ucguguagcaccagggccc

SEQ ID NO: 5132 - RNA, 19 nt, Artificial Sequence
  Description of Artificial Sequence: Synthetic oligonucleotide
aucguguagcaccagggcc

SEQ ID NO: 5133 - RNA, 19 nt, Artificial Sequence
  Description of Artificial Sequence: Synthetic oligonucleotide
caucguguagcaccagggc

SEQ ID NO: 5134 - RNA, 19 nt, Artificial Sequence
  Description of Artificial Sequence: Synthetic oligonucleotide
ccaucguguagcaccaggg

SEQ ID NO: 5135 - RNA, 19 nt, Artificial Sequence
  Description of Artificial Sequence: Synthetic oligonucleotide
uccaucguguagcaccagg

SEQ ID NO: 5136 - RNA, 19 nt, Artificial Sequence
  Description of Artificial Sequence: Synthetic oligonucleotide
guccaucguguagcaccag

SEQ ID NO: 5137 - RNA, 19 nt, Artificial Sequence
  Description of Artificial Sequence: Synthetic oligonucleotide
gguccaucguguagcacca

SEQ ID NO: 5138 - RNA, 19 nt, Artificial Sequence
  Description of Artificial Sequence: Synthetic oligonucleotide
ggguccaucguguagcacc

SEQ ID NO: 5139 - RNA, 19 nt, Artificial Sequence
  Description of Artificial Sequence: Synthetic oligonucleotide
uggguccaucguguagcac

SEQ ID NO: 5140 - RNA, 19 nt, Artificial Sequence
  Description of Artificial Sequence: Synthetic oligonucleotide
uuggguccaucguguagca

SEQ ID NO: 5141 - RNA, 19 nt, Artificial Sequence
  Description of Artificial Sequence: Synthetic oligonucleotide
cuuggguccaucguguagc

SEQ ID NO: 5142 - RNA, 19 nt, Artificial Sequence
  Description of Artificial Sequence: Synthetic oligonucleotide
ccuuggguccaucguguag

SEQ ID NO: 5143 - RNA, 19 nt, Artificial Sequence
  Description of Artificial Sequence: Synthetic oligonucleotide
uccuuggguccaucgugua

SEQ ID NO: 5144 - RNA, 19 nt, Artificial Sequence
  Description of Artificial Sequence: Synthetic oligonucleotide
guccuuggguccaucgugu

SEQ ID NO: 5145 - RNA, 19 nt, Artificial Sequence
  Description of Artificial Sequence: Synthetic oligonucleotide
gguccuuggguccaucgug

SEQ ID NO: 5146 - RNA, 19 nt, Artificial Sequence
  Description of Artificial Sequence: Synthetic oligonucleotide
ggguccuuggguccaucgu

SEQ ID NO: 5147 - RNA, 19 nt, Artificial Sequence
  Description of Artificial Sequence: Synthetic oligonucleotide
gggguccuuggguccaucg

SEQ ID NO: 5148 - RNA, 19 nt, Artificial Sequence
  Description of Artificial Sequence: Synthetic oligonucleotide
ugggguccuuggguccauc

SEQ ID NO: 5149 - RNA, 19 nt, Artificial Sequence
  Description of Artificial Sequence: Synthetic oligonucleotide
augggguccuuggguccau

SEQ ID NO: 5150 - RNA, 19 nt, Artificial Sequence
  Description of Artificial Sequence: Synthetic oligonucleotide
aaugggguccuugggucca

SEQ ID NO: 5151 - RNA, 19 nt, Artificial Sequence
  Description of Artificial Sequence: Synthetic oligonucleotide
gaaugggguccuugggucc

SEQ ID NO: 5152 - RNA, 19 nt, Artificial Sequence
  Description of Artificial Sequence: Synthetic oligonucleotide
cgaaugggguccuuggguc

SEQ ID NO: 5153 - RNA, 19 nt, Artificial Sequence
  Description of Artificial Sequence: Synthetic oligonucleotide
ucgaaugggguccuugggu

SEQ ID NO: 5154 - RNA, 19 nt, Artificial Sequence
  Description of Artificial Sequence: Synthetic oligonucleotide
gucgaaugggguccuuggg

SEQ ID NO: 5155 - RNA, 19 nt, Artificial Sequence
  Description of Artificial Sequence: Synthetic oligonucleotide
agucgaaugggguccuugg

SEQ ID NO: 5156 - RNA, 19 nt, Artificial Sequence
  Description of Artificial Sequence: Synthetic oligonucleotide
uagucgaaugggguccuug

SEQ ID NO: 5157 - RNA, 19 nt, Artificial Sequence
  Description of Artificial Sequence: Synthetic oligonucleotide
guagucgaaugggguccuu

SEQ ID NO: 5158 - RNA, 19 nt, Artificial Sequence
  Description of Artificial Sequence: Synthetic oligonucleotide
aguagucgaaugggguccu

SEQ ID NO: 5159 - RNA, 19 nt, Artificial Sequence
  Description of Artificial Sequence: Synthetic oligonucleotide
caguagucgaauggggucc

SEQ ID NO: 5160 - RNA, 19 nt, Artificial Sequence
  Description of Artificial Sequence: Synthetic oligonucleotide
acaguagucgaaugggguc

SEQ ID NO: 5161 - RNA, 19 nt, Artificial Sequence
  Description of Artificial Sequence: Synthetic oligonucleotide
cacaguagucgaauggggu

SEQ ID NO: 5162 - RNA, 19 nt, Artificial Sequence
  Description of Artificial Sequence: Synthetic oligonucleotide
gcacaguagucgaaugggg

SEQ ID NO: 5163 - RNA, 19 nt, Artificial Sequence
  Description of Artificial Sequence: Synthetic oligonucleotide
ggcacaguagucgaauggg

SEQ ID NO: 5164 - RNA, 19 nt, Artificial Sequence
  Description of Artificial Sequence: Synthetic oligonucleotide
gggcacaguagucgaaugg

SEQ ID NO: 5165 - RNA, 19 nt, Artificial Sequence
  Description of Artificial Sequence: Synthetic oligonucleotide
agggcacaguagucgaaug

SEQ ID NO: 5166 - RNA, 19 nt, Artificial Sequence
  Description of Artificial Sequence: Synthetic oligonucleotide
cagggcacaguagucgaau

SEQ ID NO: 5167 - RNA, 19 nt, Artificial Sequence
  Description of Artificial Sequence: Synthetic oligonucleotide
gcagggcacaguagucgaa

SEQ ID NO: 5168 - RNA, 19 nt, Artificial Sequence
  Description of Artificial Sequence: Synthetic oligonucleotide
cgcagggcacaguagucga

SEQ ID NO: 5169 - RNA, 19 nt, Artificial Sequence
  Description of Artificial Sequence: Synthetic oligonucleotide
ucgcagggcacaguagucg

SEQ ID NO: 5170 - RNA, 19 nt, Artificial Sequence
  Description of Artificial Sequence: Synthetic oligonucleotide
gucgcagggcacaguaguc

SEQ ID NO: 5171 - RNA, 19 nt, Artificial Sequence
  Description of Artificial Sequence: Synthetic oligonucleotide
cgucgcagggcacaguagu

SEQ ID NO: 5172 - RNA, 19 nt, Artificial Sequence
  Description of Artificial Sequence: Synthetic oligonucleotide
gcgucgcagggcacaguag

SEQ ID NO: 5173 - RNA, 19 nt, Artificial Sequence
  Description of Artificial Sequence: Synthetic oligonucleotide
agcgucgcagggcacagua

SEQ ID NO: 5174 - RNA, 19 nt, Artificial Sequence
  Description of Artificial Sequence: Synthetic oligonucleotide
cagcgucgcagggcacagu

SEQ ID NO: 5175 - RNA, 19 nt, Artificial Sequence
  Description of Artificial Sequence: Synthetic oligonucleotide
gcagcgucgcagggcacag

SEQ ID NO: 5176 - RNA, 19 nt, Artificial Sequence
  Description of Artificial Sequence: Synthetic oligonucleotide
cgcagcgucgcagggcaca

SEQ ID NO: 5177 - RNA, 19 nt, Artificial Sequence
  Description of Artificial Sequence: Synthetic oligonucleotide
gcgcagcgucgcagggcac

SEQ ID NO: 5178 - RNA, 19 nt, Artificial Sequence
  Description of Artificial Sequence: Synthetic oligonucleotide
agcgcagcgucgcagggca

SEQ ID NO: 5179 - RNA, 19 nt, Artificial Sequence
  Description of Artificial Sequence: Synthetic oligonucleotide
cagcgcagcgucgcagggc

SEQ ID NO: 5180 - RNA, 19 nt, Artificial Sequence
  Description of Artificial Sequence: Synthetic oligonucleotide
ucagcgcagcgucgcaggg

SEQ ID NO: 5181 - RNA, 19 nt, Artificial Sequence
  Description of Artificial Sequence: Synthetic oligonucleotide
aucagcgcagcgucgcagg

SEQ ID NO: 5182 - RNA, 19 nt, Artificial Sequence
  Description of Artificial Sequence: Synthetic oligonucleotide
caucagcgcagcgucgcag

SEQ ID NO: 5183 - RNA, 19 nt, Artificial Sequence
  Description of Artificial Sequence: Synthetic oligonucleotide
ucaucagcgcagcgucgca

SEQ ID NO: 5184 - RNA, 19 nt, Artificial Sequence
  Description of Artificial Sequence: Synthetic oligonucleotide
gucaucagcgcagcgucgc

SEQ ID NO: 5185 - RNA, 19 nt, Artificial Sequence
  Description of Artificial Sequence: Synthetic oligonucleotide
ggucaucagcgcagcgucg

SEQ ID NO: 5186 - RNA, 19 nt, Artificial Sequence
  Description of Artificial Sequence: Synthetic oligonucleotide
uggucaucagcgcagcguc

SEQ ID NO: 5187 - RNA, 19 nt, Artificial Sequence
  Description of Artificial Sequence: Synthetic oligonucleotide
cuggucaucagcgcagcgu

SEQ ID NO: 5188 - RNA, 19 nt, Artificial Sequence
  Description of Artificial Sequence: Synthetic oligonucleotide
gcuggucaucagcgcagcg

SEQ ID NO: 5189 - RNA, 19 nt, Artificial Sequence
  Description of Artificial Sequence: Synthetic oligonucleotide
ggcuggucaucagcgcagc

SEQ ID NO: 5190 - RNA, 19 nt, Artificial Sequence
  Description of Artificial Sequence: Synthetic oligonucleotide
cggcuggucaucagcgcag

SEQ ID NO: 5191 - RNA, 19 nt, Artificial Sequence
  Description of Artificial Sequence: Synthetic oligonucleotide
gcggcuggucaucagcgca

SEQ ID NO: 5192 - RNA, 19 nt, Artificial Sequence
  Description of Artificial Sequence: Synthetic oligonucleotide
ggcggcuggucaucagcgc

SEQ ID NO: 5193 - RNA, 19 nt, Artificial Sequence
  Description of Artificial Sequence: Synthetic oligonucleotide
uggcggcuggucaucagcg

SEQ ID NO: 5194 - RNA, 19 nt, Artificial Sequence
  Description of Artificial Sequence: Synthetic oligonucleotide
auggcggcuggucaucagc

SEQ ID NO: 5195 - RNA, 19 nt, Artificial Sequence
  Description of Artificial Sequence: Synthetic oligonucleotide
gauggcggcuggucaucag

SEQ ID NO: 5196 - RNA, 19 nt, Artificial Sequence
  Description of Artificial Sequence: Synthetic oligonucleotide
ugauggcggcuggucauca

SEQ ID NO: 5197 - RNA, 19 nt, Artificial Sequence
  Description of Artificial Sequence: Synthetic oligonucleotide
uugauggcggcuggucauc

SEQ ID NO: 5198 - RNA, 19 nt, Artificial Sequence
  Description of Artificial Sequence: Synthetic oligonucleotide
auugauggcggcuggucau

SEQ ID NO: 5199 - RNA, 19 nt, Artificial Sequence
  Description of Artificial Sequence: Synthetic oligonucleotide
gauugauggcggcugguca

SEQ ID NO: 5200 - RNA, 19 nt, Artificial Sequence
  Description of Artificial Sequence: Synthetic oligonucleotide
ggauugauggcggcugguc

SEQ ID NO: 5201 - RNA, 19 nt, Artificial Sequence
  Description of Artificial Sequence: Synthetic oligonucleotide
aggauugauggcggcuggu

SEQ ID NO: 5202 - RNA, 19 nt, Artificial Sequence
  Description of Artificial Sequence: Synthetic oligonucleotide
caggauugauggcggcugg

SEQ ID NO: 5203 - RNA, 19 nt, Artificial Sequence
  Description of Artificial Sequence: Synthetic oligonucleotide
ccaggauugauggcggcug

SEQ ID NO: 5204 - RNA, 19 nt, Artificial Sequence
  Description of Artificial Sequence: Synthetic oligonucleotide
uccaggauugauggcggcu

SEQ ID NO: 5205 - RNA, 19 nt, Artificial Sequence
  Description of Artificial Sequence: Synthetic oligonucleotide
guccaggauugauggcggc

SEQ ID NO: 5206 - RNA, 19 nt, Artificial Sequence
  Description of Artificial Sequence: Synthetic oligonucleotide
gguccaggauugauggcgg

SEQ ID NO: 5207 - RNA, 19 nt, Artificial Sequence
  Description of Artificial Sequence: Synthetic oligonucleotide
ggguccaggauugauggcg

SEQ ID NO: 5208 - RNA, 19 nt, Artificial Sequence
  Description of Artificial Sequence: Synthetic oligonucleotide
gggguccaggauugauggc

SEQ ID NO: 5209 - RNA, 19 nt, Artificial Sequence
  Description of Artificial Sequence: Synthetic oligonucleotide
ggggguccaggauugaugg

SEQ ID NO: 5210 - RNA, 19 nt, Artificial Sequence
  Description of Artificial Sequence: Synthetic oligonucleotide
gggggguccaggauugaug

SEQ ID NO: 5211 - RNA, 19 nt, Artificial Sequence
  Description of Artificial Sequence: Synthetic oligonucleotide
ugggggguccaggauugau

SEQ ID NO: 5212 - RNA, 19 nt, Artificial Sequence
  Description of Artificial Sequence: Synthetic oligonucleotide
cugggggguccaggauuga

SEQ ID NO: 5213 - RNA, 19 nt, Artificial Sequence
  Description of Artificial Sequence: Synthetic oligonucleotide
ucugggggguccaggauug

SEQ ID NO: 5214 - RNA, 19 nt, Artificial Sequence
  Description of Artificial Sequence: Synthetic oligonucleotide
gucugggggguccaggauu

SEQ ID NO: 5215 - RNA, 19 nt, Artificial Sequence
  Description of Artificial Sequence: Synthetic oligonucleotide
ggucugggggguccaggau

SEQ ID NO: 5216 - RNA, 19 nt, Artificial Sequence
  Description of Artificial Sequence: Synthetic oligonucleotide
uggucugggggguccagga

SEQ ID NO: 5217 - RNA, 19 nt, Artificial Sequence
  Description of Artificial Sequence: Synthetic oligonucleotide
cuggucugggggguccagg

SEQ ID NO: 5218 - RNA, 19 nt, Artificial Sequence
  Description of Artificial Sequence: Synthetic oligonucleotide
ccuggucugggggguccag

SEQ ID NO: 5219 - RNA, 19 nt, Artificial Sequence
  Description of Artificial Sequence: Synthetic oligonucleotide
accuggucuggggggucca

SEQ ID NO: 5220 - RNA, 19 nt, Artificial Sequence
  Description of Artificial Sequence: Synthetic oligonucleotide
caccuggucuggggggucc

SEQ ID NO: 5221 - RNA, 19 nt, Artificial Sequence
  Description of Artificial Sequence: Synthetic oligonucleotide
gcaccuggucugggggguc

SEQ ID NO: 5222 - RNA, 19 nt, Artificial Sequence
  Description of Artificial Sequence: Synthetic oligonucleotide
ugcaccuggucuggggggu

SEQ ID NO: 5223 - RNA, 19 nt, Artificial Sequence
  Description of Artificial Sequence: Synthetic oligonucleotide
cugcaccuggucugggggg

SEQ ID NO: 5224 - RNA, 19 nt, Artificial Sequence
  Description of Artificial Sequence: Synthetic oligonucleotide
acugcaccuggucuggggg

SEQ ID NO: 5225 - RNA, 19 nt, Artificial Sequence
  Description of Artificial Sequence: Synthetic oligonucleotide
aacugcaccuggucugggg

SEQ ID NO: 5226 - RNA, 19 nt, Artificial Sequence
  Description of Artificial Sequence: Synthetic oligonucleotide
aaacugcaccuggucuggg

SEQ ID NO: 5227 - RNA, 19 nt, Artificial Sequence
  Description of Artificial Sequence: Synthetic oligonucleotide
caaacugcaccuggucugg

SEQ ID NO: 5228 - RNA, 19 nt, Artificial Sequence
  Description of Artificial Sequence: Synthetic oligonucleotide
ucaaacugcaccuggucug

SEQ ID NO: 5229 - RNA, 19 nt, Artificial Sequence
  Description of Artificial Sequence: Synthetic oligonucleotide
cucaaacugcaccuggucu

SEQ ID NO: 5230 - RNA, 19 nt, Artificial Sequence
  Description of Artificial Sequence: Synthetic oligonucleotide
ucucaaacugcaccugguc

SEQ ID NO: 5231 - RNA, 19 nt, Artificial Sequence
  Description of Artificial Sequence: Synthetic oligonucleotide
uucucaaacugcaccuggu

SEQ ID NO: 5232 - RNA, 19 nt, Artificial Sequence
  Description of Artificial Sequence: Synthetic oligonucleotide
cuucucaaacugcaccugg

SEQ ID NO: 5233 - RNA, 19 nt, Artificial Sequence
  Description of Artificial Sequence: Synthetic oligonucleotide
acuucucaaacugcaccug

SEQ ID NO: 5234 - RNA, 19 nt, Artificial Sequence
  Description of Artificial Sequence: Synthetic oligonucleotide
cacuucucaaacugcaccu

SEQ ID NO: 5235 - RNA, 19 nt, Artificial Sequence
  Description of Artificial Sequence: Synthetic oligonucleotide
acacuucucaaacugcacc

SEQ ID NO: 5236 - RNA, 19 nt, Artificial Sequence
  Description of Artificial Sequence: Synthetic oligonucleotide
cacacuucucaaacugcac

SEQ ID NO: 5237 - RNA, 19 nt, Artificial Sequence
  Description of Artificial Sequence: Synthetic oligonucleotide
ccacacuucucaaacugca

SEQ ID NO: 5238 - RNA, 19 nt, Artificial Sequence
  Description of Artificial Sequence: Synthetic oligonucleotide
gccacacuucucaaacugc

SEQ ID NO: 5239 - RNA, 19 nt, Artificial Sequence
  Description of Artificial Sequence: Synthetic oligonucleotide
ugccacacuucucaaacug

SEQ ID NO: 5240 - RNA, 19 nt, Artificial Sequence
  Description of Artificial Sequence: Synthetic oligonucleotide
uugccacacuucucaaacu

SEQ ID NO: 5241 - RNA, 19 nt, Artificial Sequence
  Description of Artificial Sequence: Synthetic oligonucleotide
cuugccacacuucucaaac

SEQ ID NO: 5242 - RNA, 19 nt, Artificial Sequence
  Description of Artificial Sequence: Synthetic oligonucleotide
ucuugccacacuucucaaa

SEQ ID NO: 5243 - RNA, 19 nt, Artificial Sequence
  Description of Artificial Sequence: Synthetic oligonucleotide
cucuugccacacuucucaa

SEQ ID NO: 5244 - RNA, 19 nt, Artificial Sequence
  Description of Artificial Sequence: Synthetic oligonucleotide
ccucuugccacacuucuca

SEQ ID NO: 5245 - RNA, 19 nt, Artificial Sequence
  Description of Artificial Sequence: Synthetic oligonucleotide
cccucuugccacacuucuc

SEQ ID NO: 5246 - RNA, 19 nt, Artificial Sequence
  Description of Artificial Sequence: Synthetic oligonucleotide
acccucuugccacacuucu

SEQ ID NO: 5247 - RNA, 19 nt, Artificial Sequence
  Description of Artificial Sequence: Synthetic oligonucleotide
cacccucuugccacacuuc

SEQ ID NO: 5248 - RNA, 19 nt, Artificial Sequence
  Description of Artificial Sequence: Synthetic oligonucleotide
ccacccucuugccacacuu

SEQ ID NO: 5249 - RNA, 19 nt, Artificial Sequence
  Description of Artificial Sequence: Synthetic oligonucleotide
uccacccucuugccacacu

SEQ ID NO: 5250 - RNA, 19 nt, Artificial Sequence
  Description of Artificial Sequence: Synthetic oligonucleotide
auccacccucuugccacac

SEQ ID NO: 5251 - RNA, 19 nt, Artificial Sequence
  Description of Artificial Sequence: Synthetic oligonucleotide
gauccacccucuugccaca

SEQ ID NO: 5252 - RNA, 19 nt, Artificial Sequence
  Description of Artificial Sequence: Synthetic oligonucleotide
cgauccacccucuugccac

SEQ ID NO: 5253 - RNA, 19 nt, Artificial Sequence
  Description of Artificial Sequence: Synthetic oligonucleotide
ccgauccacccucuugcca

SEQ ID NO: 5254 - RNA, 19 nt, Artificial Sequence
  Description of Artificial Sequence: Synthetic oligonucleotide
gccgauccacccucuugcc

SEQ ID NO: 5255 - RNA, 19 nt, Artificial Sequence
  Description of Artificial Sequence: Synthetic oligonucleotide
agccgauccacccucuugc

SEQ ID NO: 5256 - RNA, 19 nt, Artificial Sequence
  Description of Artificial Sequence: Synthetic oligonucleotide
cagccgauccacccucuug

SEQ ID NO: 5257 - RNA, 19 nt, Artificial Sequence
  Description of Artificial Sequence: Synthetic oligonucleotide
ccagccgauccacccucuu

SEQ ID NO: 5258 - RNA, 19 nt, Artificial Sequence
  Description of Artificial Sequence: Synthetic oligonucleotide
uccagccgauccacccucu

SEQ ID NO: 5259 - RNA, 19 nt, Artificial Sequence
  Description of Artificial Sequence: Synthetic oligonucleotide
auccagccgauccacccuc

SEQ ID NO: 5260 - RNA, 19 nt, Artificial Sequence
  Description of Artificial Sequence: Synthetic oligonucleotide
gauccagccgauccacccu

SEQ ID NO: 5261 - RNA, 19 nt, Artificial Sequence
  Description of Artificial Sequence: Synthetic oligonucleotide
ugauccagccgauccaccc

SEQ ID NO: 5262 - RNA, 19 nt, Artificial Sequence
  Description of Artificial Sequence: Synthetic oligonucleotide
cugauccagccgauccacc

SEQ ID NO: 5263 - RNA, 19 nt, Artificial Sequence
  Description of Artificial Sequence: Synthetic oligonucleotide
gcugauccagccgauccac

SEQ ID NO: 5264 - RNA, 19 nt, Artificial Sequence
  Description of Artificial Sequence: Synthetic oligonucleotide
cgcugauccagccgaucca

SEQ ID NO: 5265 - RNA, 19 nt, Artificial Sequence
  Description of Artificial Sequence: Synthetic oligonucleotide
ccgcugauccagccgaucc

SEQ ID NO: 5266 - RNA, 19 nt, Artificial Sequence
  Description of Artificial Sequence: Synthetic oligonucleotide
gccgcugauccagccgauc

SEQ ID NO: 5267 - RNA, 19 nt, Artificial Sequence
  Description of Artificial Sequence: Synthetic oligonucleotide
cgccgcugauccagccgau

SEQ ID NO: 5268 - RNA, 19 nt, Artificial Sequence
  Description of Artificial Sequence: Synthetic oligonucleotide
acgccgcugauccagccga

SEQ ID NO: 5269 - RNA, 19 nt, Artificial Sequence
  Description of Artificial Sequence: Synthetic oligonucleotide
aacgccgcugauccagccg

SEQ ID NO: 5270 - RNA, 19 nt, Artificial Sequence
  Description of Artificial Sequence: Synthetic oligonucleotide
gaacgccgcugauccagcc

SEQ ID NO: 5271 - RNA, 19 nt, Artificial Sequence
  Description of Artificial Sequence: Synthetic oligonucleotide
ggaacgccgcugauccagc

SEQ ID NO: 5272 - RNA, 19 nt, Artificial Sequence
  Description of Artificial Sequence: Synthetic oligonucleotide
uggaacgccgcugauccag

SEQ ID NO: 5273 - RNA, 19 nt, Artificial Sequence
  Description of Artificial Sequence: Synthetic oligonucleotide
uuggaacgccgcugaucca

SEQ ID NO: 5274 - RNA, 19 nt, Artificial Sequence
  Description of Artificial Sequence: Synthetic oligonucleotide
cuuggaacgccgcugaucc

SEQ ID NO: 5275 - RNA, 19 nt, Artificial Sequence
  Description of Artificial Sequence: Synthetic oligonucleotide
gcuuggaacgccgcugauc

SEQ ID NO: 5276 - RNA, 19 nt, Artificial Sequence
  Description of Artificial Sequence: Synthetic oligonucleotide
agcuuggaacgccgcugau

SEQ ID NO: 5277 - RNA, 19 nt, Artificial Sequence
  Description of Artificial Sequence: Synthetic oligonucleotide
cagcuuggaacgccgcuga

SEQ ID NO: 5278 - RNA, 19 nt, Artificial Sequence
  Description of Artificial Sequence: Synthetic oligonucleotide
gcagcuuggaacgccgcug

SEQ ID NO: 5279 - RNA, 19 nt, Artificial Sequence
  Description of Artificial Sequence: Synthetic oligonucleotide
cgcagcuuggaacgccgcu

SEQ ID NO: 5280 - RNA, 19 nt, Artificial Sequence
  Description of Artificial Sequence: Synthetic oligonucleotide
gcgcagcuuggaacgccgc

SEQ ID NO: 5281 - RNA, 19 nt, Artificial Sequence
  Description of Artificial Sequence: Synthetic oligonucleotide
cgcgcagcuuggaacgccg

SEQ ID NO: 5282 - RNA, 19 nt, Artificial Sequence
  Description of Artificial Sequence: Synthetic oligonucleotide
acgcgcagcuuggaacgcc

SEQ ID NO: 5283 - RNA, 19 nt, Artificial Sequence
  Description of Artificial Sequence: Synthetic oligonucleotide
cacgcgcagcuuggaacgc

SEQ ID NO: 5284 - RNA, 19 nt, Artificial Sequence
  Description of Artificial Sequence: Synthetic oligonucleotide
ccacgcgcagcuuggaacg

SEQ ID NO: 5285 - RNA, 19 nt, Artificial Sequence
  Description of Artificial Sequence: Synthetic oligonucleotide
accacgcgcagcuuggaac

SEQ ID NO: 5286 - RNA, 19 nt, Artificial Sequence
  Description of Artificial Sequence: Synthetic oligonucleotide
aaccacgcgcagcuuggaa

SEQ ID NO: 5287 - RNA, 19 nt, Artificial Sequence
  Description of Artificial Sequence: Synthetic oligonucleotide
caaccacgcgcagcuugga

SEQ ID NO: 5288 - RNA, 19 nt, Artificial Sequence
  Description of Artificial Sequence: Synthetic oligonucleotide
ccaaccacgcgcagcuugg

SEQ ID NO: 5289 - RNA, 19 nt, Artificial Sequence
  Description of Artificial Sequence: Synthetic oligonucleotide
cccaaccacgcgcagcuug

SEQ ID NO: 5290 - RNA, 19 nt, Artificial Sequence
  Description of Artificial Sequence: Synthetic oligonucleotide
ccccaaccacgcgcagcuu

SEQ ID NO: 5291 - RNA, 19 nt, Artificial Sequence
  Description of Artificial Sequence: Synthetic oligonucleotide
cccccaaccacgcgcagcu

SEQ ID NO: 5292 - RNA, 19 nt, Artificial Sequence
  Description of Artificial Sequence: Synthetic oligonucleotide
gcccccaaccacgcgcagc

SEQ ID NO: 5293 - RNA, 19 nt, Artificial Sequence
  Description of Artificial Sequence: Synthetic oligonucleotide
ggcccccaaccacgcgcag

SEQ ID NO: 5294 - RNA, 19 nt, Artificial Sequence
  Description of Artificial Sequence: Synthetic oligonucleotide
uggcccccaaccacgcgca

SEQ ID NO: 5295 - RNA, 19 nt, Artificial Sequence
  Description of Artificial Sequence: Synthetic oligonucleotide
auggcccccaaccacgcgc

SEQ ID NO: 5296 - RNA, 19 nt, Artificial Sequence
  Description of Artificial Sequence: Synthetic oligonucleotide
gauggcccccaaccacgcg

SEQ ID NO: 5297 - RNA, 19 nt, Artificial Sequence
  Description of Artificial Sequence: Synthetic oligonucleotide
ggauggcccccaaccacgc

SEQ ID NO: 5298 - RNA, 19 nt, Artificial Sequence
  Description of Artificial Sequence: Synthetic oligonucleotide
cggauggcccccaaccacg

SEQ ID NO: 5299 - RNA, 19 nt, Artificial Sequence
  Description of Artificial Sequence: Synthetic oligonucleotide
ccggauggcccccaaccac

SEQ ID NO: 5300 - RNA, 19 nt, Artificial Sequence
  Description of Artificial Sequence: Synthetic oligonucleotide
cccggauggcccccaacca

SEQ ID NO: 5301 - RNA, 19 nt, Artificial Sequence
  Description of Artificial Sequence: Synthetic oligonucleotide
gcccggauggcccccaacc

SEQ ID NO: 5302 - RNA, 19 nt, Artificial Sequence
  Description of Artificial Sequence: Synthetic oligonucleotide
ugcccggauggcccccaac

SEQ ID NO: 5303 - RNA, 19 nt, Artificial Sequence
  Description of Artificial Sequence: Synthetic oligonucleotide
uugcccggauggcccccaa

SEQ ID NO: 5304 - RNA, 19 nt, Artificial Sequence
  Description of Artificial Sequence: Synthetic oligonucleotide
guugcccggauggccccca

SEQ ID NO: 5305 - RNA, 19 nt, Artificial Sequence
  Description of Artificial Sequence: Synthetic oligonucleotide
aguugcccggauggccccc

SEQ ID NO: 5306 - RNA, 19 nt, Artificial Sequence
  Description of Artificial Sequence: Synthetic oligonucleotide
gaguugcccggauggcccc

SEQ ID NO: 5307 - RNA, 19 nt, Artificial Sequence
  Description of Artificial Sequence: Synthetic oligonucleotide
ugaguugcccggauggccc

SEQ ID NO: 5308 - RNA, 19 nt, Artificial Sequence
  Description of Artificial Sequence: Synthetic oligonucleotide
gugaguugcccggauggcc

SEQ ID NO: 5309 - RNA, 19 nt, Artificial Sequence
  Description of Artificial Sequence: Synthetic oligonucleotide
ggugaguugcccggauggc

SEQ ID NO: 5310 - RNA, 19 nt, Artificial Sequence
  Description of Artificial Sequence: Synthetic oligonucleotide
gggugaguugcccggaugg

SEQ ID NO: 5311 - RNA, 19 nt, Artificial Sequence
  Description of Artificial Sequence: Synthetic oligonucleotide
agggugaguugcccggaug

SEQ ID NO: 5312 - RNA, 19 nt, Artificial Sequence
  Description of Artificial Sequence: Synthetic oligonucleotide
cagggugaguugcccggau

SEQ ID NO: 5313 - RNA, 19 nt, Artificial Sequence
  Description of Artificial Sequence: Synthetic oligonucleotide
ccagggugaguugcccgga

SEQ ID NO: 5314 - RNA, 19 nt, Artificial Sequence
  Description of Artificial Sequence: Synthetic oligonucleotide
uccagggugaguugcccgg

SEQ ID NO: 5315 - RNA, 19 nt, Artificial Sequence
  Description of Artificial Sequence: Synthetic oligonucleotide
guccagggugaguugcccg

SEQ ID NO: 5316 - RNA, 19 nt, Artificial Sequence
  Description of Artificial Sequence: Synthetic oligonucleotide
uguccagggugaguugccc

SEQ ID NO: 5317 - RNA, 19 nt, Artificial Sequence
  Description of Artificial Sequence: Synthetic oligonucleotide
cuguccagggugaguugcc

SEQ ID NO: 5318 - RNA, 19 nt, Artificial Sequence
  Description of Artificial Sequence: Synthetic oligonucleotide
acuguccagggugaguugc

SEQ ID NO: 5319 - RNA, 19 nt, Artificial Sequence
  Description of Artificial Sequence: Synthetic oligonucleotide
gacuguccagggugaguug

SEQ ID NO: 5320 - RNA, 19 nt, Artificial Sequence
  Description of Artificial Sequence: Synthetic oligonucleotide
ugacuguccagggugaguu

SEQ ID NO: 5321 - RNA, 19 nt, Artificial Sequence
  Description of Artificial Sequence: Synthetic oligonucleotide
cugacuguccagggugagu

SEQ ID NO: 5322 - RNA, 19 nt, Artificial Sequence
  Description of Artificial Sequence: Synthetic oligonucleotide
gcugacuguccagggugag

SEQ ID NO: 5323 - RNA, 19 nt, Artificial Sequence
  Description of Artificial Sequence: Synthetic oligonucleotide
agcugacuguccaggguga

SEQ ID NO: 5324 - RNA, 19 nt, Artificial Sequence
  Description of Artificial Sequence: Synthetic oligonucleotide
aagcugacuguccagggug

SEQ ID NO: 5325 - RNA, 19 nt, Artificial Sequence
  Description of Artificial Sequence: Synthetic oligonucleotide
caagcugacuguccagggu

SEQ ID NO: 5326 - RNA, 19 nt, Artificial Sequence
  Description of Artificial Sequence: Synthetic oligonucleotide
gcaagcugacuguccaggg

SEQ ID NO: 5327 - RNA, 19 nt, Artificial Sequence
  Description of Artificial Sequence: Synthetic oligonucleotide
cgcaagcugacuguccagg

SEQ ID NO: 5328 - RNA, 19 nt, Artificial Sequence
  Description of Artificial Sequence: Synthetic oligonucleotide
ccgcaagcugacuguccag

SEQ ID NO: 5329 - RNA, 19 nt, Artificial Sequence
  Description of Artificial Sequence: Synthetic oligonucleotide
uccgcaagcugacugucca

SEQ ID NO: 5330 - RNA, 19 nt, Artificial Sequence
  Description of Artificial Sequence: Synthetic oligonucleotide
uuccgcaagcugacugucc

SEQ ID NO: 5331 - RNA, 19 nt, Artificial Sequence
  Description of Artificial Sequence: Synthetic oligonucleotide
auuccgcaagcugacuguc

SEQ ID NO: 5332 - RNA, 19 nt, Artificial Sequence
  Description of Artificial Sequence: Synthetic oligonucleotide
gauuccgcaagcugacugu

SEQ ID NO: 5333 - RNA, 19 nt, Artificial Sequence
  Description of Artificial Sequence: Synthetic oligonucleotide
cgauuccgcaagcugacug

SEQ ID NO: 5334 - RNA, 19 nt, Artificial Sequence
  Description of Artificial Sequence: Synthetic oligonucleotide
ccgauuccgcaagcugacu

SEQ ID NO: 5335 - RNA, 19 nt, Artificial Sequence
  Description of Artificial Sequence: Synthetic oligonucleotide
gccgauuccgcaagcugac

SEQ ID NO: 5336 - RNA, 19 nt, Artificial Sequence
  Description of Artificial Sequence: Synthetic oligonucleotide
ugccgauuccgcaagcuga

SEQ ID NO: 5337 - RNA, 19 nt, Artificial Sequence
  Description of Artificial Sequence: Synthetic oligonucleotide
cugccgauuccgcaagcug

SEQ ID NO: 5338 - RNA, 19 nt, Artificial Sequence
  Description of Artificial Sequence: Synthetic oligonucleotide
ccugccgauuccgcaagcu

SEQ ID NO: 5339 - RNA, 19 nt, Artificial Sequence
  Description of Artificial Sequence: Synthetic oligonucleotide
cccugccgauuccgcaagc

SEQ ID NO: 5340 - RNA, 19 nt, Artificial Sequence
  Description of Artificial Sequence: Synthetic oligonucleotide
gcccugccgauuccgcaag

SEQ ID NO: 5341 - RNA, 19 nt, Artificial Sequence
  Description of Artificial Sequence: Synthetic oligonucleotide
ggcccugccgauuccgcaa

SEQ ID NO: 5342 - RNA, 19 nt, Artificial Sequence
  Description of Artificial Sequence: Synthetic oligonucleotide
uggcccugccgauuccgca

SEQ ID NO: 5343 - RNA, 19 nt, Artificial Sequence
  Description of Artificial Sequence: Synthetic oligonucleotide
cuggcccugccgauuccgc

SEQ ID NO: 5344 - RNA, 19 nt, Artificial Sequence
  Description of Artificial Sequence: Synthetic oligonucleotide
gcuggcccugccgauuccg

SEQ ID NO: 5345 - RNA, 19 nt, Artificial Sequence
  Description of Artificial Sequence: Synthetic oligonucleotide
ugcuggcccugccgauucc

SEQ ID NO: 5346 - RNA, 19 nt, Artificial Sequence
  Description of Artificial Sequence: Synthetic oligonucleotide
augcuggcccugccgauuc

SEQ ID NO: 5347 - RNA, 19 nt, Artificial Sequence
  Description of Artificial Sequence: Synthetic oligonucleotide
aaugcuggcccugccgauu

SEQ ID NO: 5348 - RNA, 19 nt, Artificial Sequence
  Description of Artificial Sequence: Synthetic oligonucleotide
aaaugcuggcccugccgau

SEQ ID NO: 5349 - RNA, 19 nt, Artificial Sequence
  Description of Artificial Sequence: Synthetic oligonucleotide
gaaaugcuggcccugccga

SEQ ID NO: 5350 - RNA, 19 nt, Artificial Sequence
  Description of Artificial Sequence: Synthetic oligonucleotide
agaaaugcuggcccugccg

SEQ ID NO: 5351 - RNA, 19 nt, Artificial Sequence
  Description of Artificial Sequence: Synthetic oligonucleotide
cagaaaugcuggcccugcc

SEQ ID NO: 5352 - RNA, 19 nt, Artificial Sequence
  Description of Artificial Sequence: Synthetic oligonucleotide
gcagaaaugcuggcccugc

SEQ ID NO: 5353 - RNA, 19 nt, Artificial Sequence
  Description of Artificial Sequence: Synthetic oligonucleotide
cgcagaaaugcuggcccug

SEQ ID NO: 5354 - RNA, 19 nt, Artificial Sequence
  Description of Artificial Sequence: Synthetic oligonucleotide
ccgcagaaaugcuggcccu

SEQ ID NO: 5355 - RNA, 19 nt, Artificial Sequence
  Description of Artificial Sequence: Synthetic oligonucleotide
cccgcagaaaugcuggccc

SEQ ID NO: 5356 - RNA, 19 nt, Artificial Sequence
  Description of Artificial Sequence: Synthetic oligonucleotide
ccccgcagaaaugcuggcc

SEQ ID NO: 5357 - RNA, 19 nt, Artificial Sequence
  Description of Artificial Sequence: Synthetic oligonucleotide
cccccgcagaaaugcuggc

SEQ ID NO: 5358 - RNA, 19 nt, Artificial Sequence
  Description of Artificial Sequence: Synthetic oligonucleotide
ccccccgcagaaaugcugg

SEQ ID NO: 5359 - RNA, 19 nt, Artificial Sequence
  Description of Artificial Sequence: Synthetic oligonucleotide
accccccgcagaaaugcug

SEQ ID NO: 5360 - RNA, 19 nt, Artificial Sequence
  Description of Artificial Sequence: Synthetic oligonucleotide
gaccccccgcagaaaugcu

SEQ ID NO: 5361 - RNA, 19 nt, Artificial Sequence
  Description of Artificial Sequence: Synthetic oligonucleotide
agaccccccgcagaaaugc

SEQ ID NO: 5362 - RNA, 19 nt, Artificial Sequence
  Description of Artificial Sequence: Synthetic oligonucleotide
gagaccccccgcagaaaug

SEQ ID NO: 5363 - RNA, 19 nt, Artificial Sequence
  Description of Artificial Sequence: Synthetic oligonucleotide
agagaccccccgcagaaau

SEQ ID NO: 5364 - RNA, 19 nt, Artificial Sequence
  Description of Artificial Sequence: Synthetic oligonucleotide
uagagaccccccgcagaaa

SEQ ID NO: 5365 - RNA, 19 nt, Artificial Sequence
  Description of Artificial Sequence: Synthetic oligonucleotide
cuagagaccccccgcagaa

SEQ ID NO: 5366 - RNA, 19 nt, Artificial Sequence
  Description of Artificial Sequence: Synthetic oligonucleotide
acuagagaccccccgcaga

SEQ ID NO: 5367 - RNA, 19 nt, Artificial Sequence
  Description of Artificial Sequence: Synthetic oligonucleotide
cacuagagaccccccgcag

SEQ ID NO: 5368 - RNA, 19 nt, Artificial Sequence
  Description of Artificial Sequence: Synthetic oligonucleotide
ucacuagagaccccccgca

SEQ ID NO: 5369 - RNA, 19 nt, Artificial Sequence
  Description of Artificial Sequence: Synthetic oligonucleotide
uucacuagagaccccccgc

SEQ ID NO: 5370 - RNA, 19 nt, Artificial Sequence
  Description of Artificial Sequence: Synthetic oligonucleotide
cuucacuagagaccccccg

SEQ ID NO: 5371 - RNA, 19 nt, Artificial Sequence
  Description of Artificial Sequence: Synthetic oligonucleotide
ccuucacuagagacccccc

SEQ ID NO: 5372 - RNA, 19 nt, Artificial Sequence
  Description of Artificial Sequence: Synthetic oligonucleotide
uccuucacuagagaccccc

SEQ ID NO: 5373 - RNA, 19 nt, Artificial Sequence
  Description of Artificial Sequence: Synthetic oligonucleotide
cuccuucacuagagacccc

SEQ ID NO: 5374 - RNA, 19 nt, Artificial Sequence
  Description of Artificial Sequence: Synthetic oligonucleotide
gcuccuucacuagagaccc

SEQ ID NO: 5375 - RNA, 19 nt, Artificial Sequence
  Description of Artificial Sequence: Synthetic oligonucleotide
ugcuccuucacuagagacc

SEQ ID NO: 5376 - RNA, 19 nt, Artificial Sequence
  Description of Artificial Sequence: Synthetic oligonucleotide
cugcuccuucacuagagac

SEQ ID NO: 5377 - RNA, 19 nt, Artificial Sequence
  Description of Artificial Sequence: Synthetic oligonucleotide
acugcuccuucacuagaga

SEQ ID NO: 5378 - RNA, 19 nt, Artificial Sequence
  Description of Artificial Sequence: Synthetic oligonucleotide
cacugcuccuucacuagag

SEQ ID NO: 5379 - RNA, 19 nt, Artificial Sequence
  Description of Artificial Sequence: Synthetic oligonucleotide
ccacugcuccuucacuaga

SEQ ID NO: 5380 - RNA, 19 nt, Artificial Sequence
  Description of Artificial Sequence: Synthetic oligonucleotide
uccacugcuccuucacuag

SEQ ID NO: 5381 - RNA, 19 nt, Artificial Sequence
  Description of Artificial Sequence: Synthetic oligonucleotide
auccacugcuccuucacua

SEQ ID NO: 5382 - RNA, 19 nt, Artificial Sequence
  Description of Artificial Sequence: Synthetic oligonucleotide
uauccacugcuccuucacu

SEQ ID NO: 5383 - RNA, 19 nt, Artificial Sequence
  Description of Artificial Sequence: Synthetic oligonucleotide
guauccacugcuccuucac

SEQ ID NO: 5384 - RNA, 19 nt, Artificial Sequence
  Description of Artificial Sequence: Synthetic oligonucleotide
aguauccacugcuccuuca

SEQ ID NO: 5385 - RNA, 19 nt, Artificial Sequence
  Description of Artificial Sequence: Synthetic oligonucleotide
caguauccacugcuccuuc

SEQ ID NO: 5386 - RNA, 19 nt, Artificial Sequence
  Description of Artificial Sequence: Synthetic oligonucleotide
ucaguauccacugcuccuu

SEQ ID NO: 5387 - RNA, 19 nt, Artificial Sequence
  Description of Artificial Sequence: Synthetic oligonucleotide
gucaguauccacugcuccu

SEQ ID NO: 5388 - RNA, 19 nt, Artificial Sequence
  Description of Artificial Sequence: Synthetic oligonucleotide
agucaguauccacugcucc

SEQ ID NO: 5389 - RNA, 19 nt, Artificial Sequence
  Description of Artificial Sequence: Synthetic oligonucleotide
cagucaguauccacugcuc

SEQ ID NO: 5390 - RNA, 19 nt, Artificial Sequence
  Description of Artificial Sequence: Synthetic oligonucleotide
gcagucaguauccacugcu

SEQ ID NO: 5391 - RNA, 19 nt, Artificial Sequence
  Description of Artificial Sequence: Synthetic oligonucleotide
ggcagucaguauccacugc

SEQ ID NO: 5392 - RNA, 19 nt, Artificial Sequence
  Description of Artificial Sequence: Synthetic oligonucleotide
gggcagucaguauccacug

SEQ ID NO: 5393 - RNA, 19 nt, Artificial Sequence
  Description of Artificial Sequence: Synthetic oligonucleotide
cgggcagucaguauccacu

SEQ ID NO: 5394 - RNA, 19 nt, Artificial Sequence
  Description of Artificial Sequence: Synthetic oligonucleotide
ccgggcagucaguauccac

SEQ ID NO: 5395 - RNA, 19 nt, Artificial Sequence
  Description of Artificial Sequence: Synthetic oligonucleotide
gccgggcagucaguaucca

SEQ ID NO: 5396 - RNA, 19 nt, Artificial Sequence
  Description of Artificial Sequence: Synthetic oligonucleotide
ugccgggcagucaguaucc

SEQ ID NO: 5397 - RNA, 19 nt, Artificial Sequence
  Description of Artificial Sequence: Synthetic oligonucleotide
cugccgggcagucaguauc

SEQ ID NO: 5398 - RNA, 19 nt, Artificial Sequence
  Description of Artificial Sequence: Synthetic oligonucleotide
acugccgggcagucaguau

SEQ ID NO: 5399 - RNA, 19 nt, Artificial Sequence
  Description of Artificial Sequence: Synthetic oligonucleotide
cacugccgggcagucagua

SEQ ID NO: 5400 - RNA, 19 nt, Artificial Sequence
  Description of Artificial Sequence: Synthetic oligonucleotide
gcacugccgggcagucagu

SEQ ID NO: 5401 - RNA, 19 nt, Artificial Sequence
  Description of Artificial Sequence: Synthetic oligonucleotide
agcacugccgggcagucag

SEQ ID NO: 5402 - RNA, 19 nt, Artificial Sequence
  Description of Artificial Sequence: Synthetic oligonucleotide
aagcacugccgggcaguca

SEQ ID NO: 5403 - RNA, 19 nt, Artificial Sequence
  Description of Artificial Sequence: Synthetic oligonucleotide
gaagcacugccgggcaguc

SEQ ID NO: 5404 - RNA, 19 nt, Artificial Sequence
  Description of Artificial Sequence: Synthetic oligonucleotide
agaagcacugccgggcagu

SEQ ID NO: 5405 - RNA, 19 nt, Artificial Sequence
  Description of Artificial Sequence: Synthetic oligonucleotide
gagaagcacugccgggcag

SEQ ID NO: 5406 - RNA, 19 nt, Artificial Sequence
  Description of Artificial Sequence: Synthetic oligonucleotide
ggagaagcacugccgggca

SEQ ID NO: 5407 - RNA, 19 nt, Artificial Sequence
  Description of Artificial Sequence: Synthetic oligonucleotide
aggagaagcacugccgggc

SEQ ID NO: 5408 - RNA, 19 nt, Artificial Sequence
  Description of Artificial Sequence: Synthetic oligonucleotide
gaggagaagcacugccggg

SEQ ID NO: 5409 - RNA, 19 nt, Artificial Sequence
  Description of Artificial Sequence: Synthetic oligonucleotide
ggaggagaagcacugccgg

SEQ ID NO: 5410 - RNA, 19 nt, Artificial Sequence
  Description of Artificial Sequence: Synthetic oligonucleotide
aggaggagaagcacugccg

SEQ ID NO: 5411 - RNA, 19 nt, Artificial Sequence
  Description of Artificial Sequence: Synthetic oligonucleotide
caggaggagaagcacugcc

SEQ ID NO: 5412 - RNA, 19 nt, Artificial Sequence
  Description of Artificial Sequence: Synthetic oligonucleotide
gcaggaggagaagcacugc

SEQ ID NO: 5413 - RNA, 19 nt, Artificial Sequence
  Description of Artificial Sequence: Synthetic oligonucleotide
ggcaggaggagaagcacug

SEQ ID NO: 5414 - RNA, 19 nt, Artificial Sequence
  Description of Artificial Sequence: Synthetic oligonucleotide
uggcaggaggagaagcacu

SEQ ID NO: 5415 - RNA, 19 nt, Artificial Sequence
  Description of Artificial Sequence: Synthetic oligonucleotide
auggcaggaggagaagcac

SEQ ID NO: 5416 - RNA, 19 nt, Artificial Sequence
  Description of Artificial Sequence: Synthetic oligonucleotide
uauggcaggaggagaagca

SEQ ID NO: 5417 - RNA, 19 nt, Artificial Sequence
  Description of Artificial Sequence: Synthetic oligonucleotide
auauggcaggaggagaagc

SEQ ID NO: 5418 - RNA, 19 nt, Artificial Sequence
  Description of Artificial Sequence: Synthetic oligonucleotide
cauauggcaggaggagaag

SEQ ID NO: 5419 - RNA, 19 nt, Artificial Sequence
  Description of Artificial Sequence: Synthetic oligonucleotide
gcauauggcaggaggagaa

SEQ ID NO: 5420 - RNA, 19 nt, Artificial Sequence
  Description of Artificial Sequence: Synthetic oligonucleotide
ggcauauggcaggaggaga

SEQ ID NO: 5421 - RNA, 19 nt, Artificial Sequence
  Description of Artificial Sequence: Synthetic oligonucleotide
aggcauauggcaggaggag

SEQ ID NO: 5422 - RNA, 19 nt, Artificial Sequence
  Description of Artificial Sequence: Synthetic oligonucleotide
gaggcauauggcaggagga

SEQ ID NO: 5423 - RNA, 19 nt, Artificial Sequence
  Description of Artificial Sequence: Synthetic oligonucleotide
agaggcauauggcaggagg

SEQ ID NO: 5424 - RNA, 19 nt, Artificial Sequence
  Description of Artificial Sequence: Synthetic oligonucleotide
gagaggcauauggcaggag

SEQ ID NO: 5425 - RNA, 19 nt, Artificial Sequence
  Description of Artificial Sequence: Synthetic oligonucleotide
ugagaggcauauggcagga

SEQ ID NO: 5426 - RNA, 19 nt, Artificial Sequence
  Description of Artificial Sequence: Synthetic oligonucleotide
gugagaggcauauggcagg

SEQ ID NO: 5427 - RNA, 19 nt, Artificial Sequence
  Description of Artificial Sequence: Synthetic oligonucleotide
cgugagaggcauauggcag

SEQ ID NO: 5428 - RNA, 19 nt, Artificial Sequence
  Description of Artificial Sequence: Synthetic oligonucleotide
ccgugagaggcauauggca

SEQ ID NO: 5429 - RNA, 19 nt, Artificial Sequence
  Description of Artificial Sequence: Synthetic oligonucleotide
cccgugagaggcauauggc

SEQ ID NO: 5430 - RNA, 19 nt, Artificial Sequence
  Description of Artificial Sequence: Synthetic oligonucleotide
gcccgugagaggcauaugg

SEQ ID NO: 5431 - RNA, 19 nt, Artificial Sequence
  Description of Artificial Sequence: Synthetic oligonucleotide
agcccgugagaggcauaug

SEQ ID NO: 5432 - RNA, 19 nt, Artificial Sequence
  Description of Artificial Sequence: Synthetic oligonucleotide
uagcccgugagaggcauau

SEQ ID NO: 5433 - RNA, 19 nt, Artificial Sequence
  Description of Artificial Sequence: Synthetic oligonucleotide
auagcccgugagaggcaua

SEQ ID NO: 5434 - RNA, 19 nt, Artificial Sequence
  Description of Artificial Sequence: Synthetic oligonucleotide
cauagcccgugagaggcau

SEQ ID NO: 5435 - RNA, 19 nt, Artificial Sequence
  Description of Artificial Sequence: Synthetic oligonucleotide
ucauagcccgugagaggca

SEQ ID NO: 5436 - RNA, 19 nt, Artificial Sequence
  Description of Artificial Sequence: Synthetic oligonucleotide
cucauagcccgugagaggc

SEQ ID NO: 5437 - RNA, 19 nt, Artificial Sequence
  Description of Artificial Sequence: Synthetic oligonucleotide
ccucauagcccgugagagg

SEQ ID NO: 5438 - RNA, 19 nt, Artificial Sequence
  Description of Artificial Sequence: Synthetic oligonucleotide
accucauagcccgugagag

SEQ ID NO: 5439 - RNA, 19 nt, Artificial Sequence
  Description of Artificial Sequence: Synthetic oligonucleotide
uaccucauagcccgugaga

SEQ ID NO: 5440 - RNA, 19 nt, Artificial Sequence
  Description of Artificial Sequence: Synthetic oligonucleotide
auaccucauagcccgugag

SEQ ID NO: 5441 - RNA, 19 nt, Artificial Sequence
  Description of Artificial Sequence: Synthetic oligonucleotide
cauaccucauagcccguga

SEQ ID NO: 5442 - RNA, 19 nt, Artificial Sequence
  Description of Artificial Sequence: Synthetic oligonucleotide
ccauaccucauagcccgug

SEQ ID NO: 5443 - RNA, 19 nt, Artificial Sequence
  Description of Artificial Sequence: Synthetic oligonucleotide
accauaccucauagcccgu

SEQ ID NO: 5444 - RNA, 19 nt, Artificial Sequence
  Description of Artificial Sequence: Synthetic oligonucleotide
aaccauaccucauagcccg

SEQ ID NO: 5445 - RNA, 19 nt, Artificial Sequence
  Description of Artificial Sequence: Synthetic oligonucleotide
caaccauaccucauagccc

SEQ ID NO: 5446 - RNA, 19 nt, Artificial Sequence
  Description of Artificial Sequence: Synthetic oligonucleotide
ccaaccauaccucauagcc

SEQ ID NO: 5447 - RNA, 19 nt, Artificial Sequence
  Description of Artificial Sequence: Synthetic oligonucleotide
cccaaccauaccucauagc

SEQ ID NO: 5448 - RNA, 19 nt, Artificial Sequence
  Description of Artificial Sequence: Synthetic oligonucleotide
gcccaaccauaccucauag

SEQ ID NO: 5449 - RNA, 19 nt, Artificial Sequence
  Description of Artificial Sequence: Synthetic oligonucleotide
ugcccaaccauaccucaua

SEQ ID NO: 5450 - RNA, 19 nt, Artificial Sequence
  Description of Artificial Sequence: Synthetic oligonucleotide
gugcccaaccauaccucau

SEQ ID NO: 5451 - RNA, 19 nt, Artificial Sequence
  Description of Artificial Sequence: Synthetic oligonucleotide
ggugcccaaccauaccuca

SEQ ID NO: 5452 - RNA, 19 nt, Artificial Sequence
  Description of Artificial Sequence: Synthetic oligonucleotide
gggugcccaaccauaccuc

SEQ ID NO: 5453 - RNA, 19 nt, Artificial Sequence
  Description of Artificial Sequence: Synthetic oligonucleotide
agggugcccaaccauaccu

SEQ ID NO: 5454 - RNA, 19 nt, Artificial Sequence
  Description of Artificial Sequence: Synthetic oligonucleotide
cagggugcccaaccauacc

SEQ ID NO: 5455 - RNA, 19 nt, Artificial Sequence
  Description of Artificial Sequence: Synthetic oligonucleotide
acagggugcccaaccauac

SEQ ID NO: 5456 - RNA, 19 nt, Artificial Sequence
  Description of Artificial Sequence: Synthetic oligonucleotide
aacagggugcccaaccaua

SEQ ID NO: 5457 - RNA, 19 nt, Artificial Sequence
  Description of Artificial Sequence: Synthetic oligonucleotide
gaacagggugcccaaccau

SEQ ID NO: 5458 - RNA, 19 nt, Artificial Sequence
  Description of Artificial Sequence: Synthetic oligonucleotide
ggaacagggugcccaacca

SEQ ID NO: 5459 - RNA, 19 nt, Artificial Sequence
  Description of Artificial Sequence: Synthetic oligonucleotide
uggaacagggugcccaacc

SEQ ID NO: 5460 - RNA, 19 nt, Artificial Sequence
  Description of Artificial Sequence: Synthetic oligonucleotide
cuggaacagggugcccaac

SEQ ID NO: 5461 - RNA, 19 nt, Artificial Sequence
  Description of Artificial Sequence: Synthetic oligonucleotide
ucuggaacagggugcccaa

SEQ ID NO: 5462 - RNA, 19 nt, Artificial Sequence
  Description of Artificial Sequence: Synthetic oligonucleotide
uucuggaacagggugccca

SEQ ID NO: 5463 - RNA, 19 nt, Artificial Sequence
  Description of Artificial Sequence: Synthetic oligonucleotide
guucuggaacagggugccc

SEQ ID NO: 5464 - RNA, 19 nt, Artificial Sequence
  Description of Artificial Sequence: Synthetic oligonucleotide
gguucuggaacagggugcc

SEQ ID NO: 5465 - RNA, 19 nt, Artificial Sequence
  Description of Artificial Sequence: Synthetic oligonucleotide
ggguucuggaacagggugc

SEQ ID NO: 5466 - RNA, 19 nt, Artificial Sequence
  Description of Artificial Sequence: Synthetic oligonucleotide
uggguucuggaacagggug

SEQ ID NO: 5467 - RNA, 19 nt, Artificial Sequence
  Description of Artificial Sequence: Synthetic oligonucleotide
guggguucuggaacagggu

SEQ ID NO: 5468 - RNA, 19 nt, Artificial Sequence
  Description of Artificial Sequence: Synthetic oligonucleotide
uguggguucuggaacaggg

SEQ ID NO: 5469 - RNA, 19 nt, Artificial Sequence
  Description of Artificial Sequence: Synthetic oligonucleotide
cuguggguucuggaacagg

SEQ ID NO: 5470 - RNA, 19 nt, Artificial Sequence
  Description of Artificial Sequence: Synthetic oligonucleotide
gcuguggguucuggaacag

SEQ ID NO: 5471 - RNA, 19 nt, Artificial Sequence
  Description of Artificial Sequence: Synthetic oligonucleotide
ugcuguggguucuggaaca

SEQ ID NO: 5472 - RNA, 19 nt, Artificial Sequence
  Description of Artificial Sequence: Synthetic oligonucleotide
augcuguggguucuggaac

SEQ ID NO: 5473 - RNA, 19 nt, Artificial Sequence
  Description of Artificial Sequence: Synthetic oligonucleotide
caugcuguggguucuggaa

SEQ ID NO: 5474 - RNA, 19 nt, Artificial Sequence
  Description of Artificial Sequence: Synthetic oligonucleotide
ccaugcuguggguucugga

SEQ ID NO: 5475 - RNA, 19 nt, Artificial Sequence
  Description of Artificial Sequence: Synthetic oligonucleotide
uccaugcuguggguucugg

SEQ ID NO: 5476 - RNA, 19 nt, Artificial Sequence
  Description of Artificial Sequence: Synthetic oligonucleotide
cuccaugcuguggguucug

SEQ ID NO: 5477 - RNA, 19 nt, Artificial Sequence
  Description of Artificial Sequence: Synthetic oligonucleotide
ucuccaugcuguggguucu

SEQ ID NO: 5478 - RNA, 19 nt, Artificial Sequence
  Description of Artificial Sequence: Synthetic oligonucleotide
cucuccaugcuguggguuc

SEQ ID NO: 5479 - RNA, 19 nt, Artificial Sequence
  Description of Artificial Sequence: Synthetic oligonucleotide
gcucuccaugcuguggguu

SEQ ID NO: 5480 - RNA, 19 nt, Artificial Sequence
  Description of Artificial Sequence: Synthetic oligonucleotide
ggcucuccaugcugugggu

SEQ ID NO: 5481 - RNA, 19 nt, Artificial Sequence
  Description of Artificial Sequence: Synthetic oligonucleotide
uggcucuccaugcuguggg

SEQ ID NO: 5482 - RNA, 19 nt, Artificial Sequence
  Description of Artificial Sequence: Synthetic oligonucleotide
uuggcucuccaugcugugg

SEQ ID NO: 5483 - RNA, 19 nt, Artificial Sequence
  Description of Artificial Sequence: Synthetic oligonucleotide
cuuggcucuccaugcugug

SEQ ID NO: 5484 - RNA, 19 nt, Artificial Sequence
  Description of Artificial Sequence: Synthetic oligonucleotide
gcuuggcucuccaugcugu

SEQ ID NO: 5485 - RNA, 19 nt, Artificial Sequence
  Description of Artificial Sequence: Synthetic oligonucleotide
ggcuuggcucuccaugcug

SEQ ID NO: 5486 - RNA, 19 nt, Artificial Sequence
  Description of Artificial Sequence: Synthetic oligonucleotide
aggcuuggcucuccaugcu

SEQ ID NO: 5487 - RNA, 19 nt, Artificial Sequence
  Description of Artificial Sequence: Synthetic oligonucleotide
uaggcuuggcucuccaugc

SEQ ID NO: 5488 - RNA, 19 nt, Artificial Sequence
  Description of Artificial Sequence: Synthetic oligonucleotide
guaggcuuggcucuccaug

SEQ ID NO: 5489 - RNA, 19 nt, Artificial Sequence
  Description of Artificial Sequence: Synthetic oligonucleotide
uguaggcuuggcucuccau

SEQ ID NO: 5490 - RNA, 19 nt, Artificial Sequence
  Description of Artificial Sequence: Synthetic oligonucleotide
cuguaggcuuggcucucca

SEQ ID NO: 5491 - RNA, 19 nt, Artificial Sequence
  Description of Artificial Sequence: Synthetic oligonucleotide
gcuguaggcuuggcucucc

SEQ ID NO: 5492 - RNA, 19 nt, Artificial Sequence
  Description of Artificial Sequence: Synthetic oligonucleotide
cgcuguaggcuuggcucuc

SEQ ID NO: 5493 - RNA, 19 nt, Artificial Sequence
  Description of Artificial Sequence: Synthetic oligonucleotide
ccgcuguaggcuuggcucu

SEQ ID NO: 5494 - RNA, 19 nt, Artificial Sequence
  Description of Artificial Sequence: Synthetic oligonucleotide
cccgcuguaggcuuggcuc

SEQ ID NO: 5495 - RNA, 19 nt, Artificial Sequence
  Description of Artificial Sequence: Synthetic oligonucleotide
acccgcuguaggcuuggcu

SEQ ID NO: 5496 - RNA, 19 nt, Artificial Sequence
  Description of Artificial Sequence: Synthetic oligonucleotide
gacccgcuguaggcuuggc

SEQ ID NO: 5497 - RNA, 19 nt, Artificial Sequence
  Description of Artificial Sequence: Synthetic oligonucleotide
ggacccgcuguaggcuugg

SEQ ID NO: 5498 - RNA, 19 nt, Artificial Sequence
  Description of Artificial Sequence: Synthetic oligonucleotide
gggacccgcuguaggcuug

SEQ ID NO: 5499 - RNA, 19 nt, Artificial Sequence
  Description of Artificial Sequence: Synthetic oligonucleotide
ugggacccgcuguaggcuu

SEQ ID NO: 5500 - RNA, 19 nt, Artificial Sequence
  Description of Artificial Sequence: Synthetic oligonucleotide
cugggacccgcuguaggcu

SEQ ID NO: 5501 - RNA, 19 nt, Artificial Sequence
  Description of Artificial Sequence: Synthetic oligonucleotide
acugggacccgcuguaggc

SEQ ID NO: 5502 - RNA, 19 nt, Artificial Sequence
  Description of Artificial Sequence: Synthetic oligonucleotide
uacugggacccgcuguagg

SEQ ID NO: 5503 - RNA, 19 nt, Artificial Sequence
  Description of Artificial Sequence: Synthetic oligonucleotide
cuacugggacccgcuguag

SEQ ID NO: 5504 - RNA, 19 nt, Artificial Sequence
  Description of Artificial Sequence: Synthetic oligonucleotide
gcuacugggacccgcugua

SEQ ID NO: 5505 - RNA, 19 nt, Artificial Sequence
  Description of Artificial Sequence: Synthetic oligonucleotide
ggcuacugggacccgcugu

SEQ ID NO: 5506 - RNA, 19 nt, Artificial Sequence
  Description of Artificial Sequence: Synthetic oligonucleotide
uggcuacugggacccgcug

SEQ ID NO: 5507 - RNA, 19 nt, Artificial Sequence
  Description of Artificial Sequence: Synthetic oligonucleotide
uuggcuacugggacccgcu

SEQ ID NO: 5508 - RNA, 19 nt, Artificial Sequence
  Description of Artificial Sequence: Synthetic oligonucleotide
cuuggcuacugggacccgc

SEQ ID NO: 5509 - RNA, 19 nt, Artificial Sequence
  Description of Artificial Sequence: Synthetic oligonucleotide
ucuuggcuacugggacccg

SEQ ID NO: 5510 - RNA, 19 nt, Artificial Sequence
  Description of Artificial Sequence: Synthetic oligonucleotide
aucuuggcuacugggaccc

SEQ ID NO: 5511 - RNA, 19 nt, Artificial Sequence
  Description of Artificial Sequence: Synthetic oligonucleotide
caucuuggcuacugggacc

SEQ ID NO: 5512 - RNA, 19 nt, Artificial Sequence
  Description of Artificial Sequence: Synthetic oligonucleotide
ccaucuuggcuacugggac

SEQ ID NO: 5513 - RNA, 19 nt, Artificial Sequence
  Description of Artificial Sequence: Synthetic oligonucleotide
accaucuuggcuacuggga

SEQ ID NO: 5514 - RNA, 19 nt, Artificial Sequence
  Description of Artificial Sequence: Synthetic oligonucleotide
caccaucuuggcuacuggg

SEQ ID NO: 5515 - RNA, 19 nt, Artificial Sequence
  Description of Artificial Sequence: Synthetic oligonucleotide
acaccaucuuggcuacugg

SEQ ID NO: 5516 - RNA, 19 nt, Artificial Sequence
  Description of Artificial Sequence: Synthetic oligonucleotide
cacaccaucuuggcuacug

SEQ ID NO: 5517 - RNA, 19 nt, Artificial Sequence
  Description of Artificial Sequence: Synthetic oligonucleotide
acacaccaucuuggcuacu

SEQ ID NO: 5518 - RNA, 19 nt, Artificial Sequence
  Description of Artificial Sequence: Synthetic oligonucleotide
cacacaccaucuuggcuac

SEQ ID NO: 5519 - RNA, 19 nt, Artificial Sequence
  Description of Artificial Sequence: Synthetic oligonucleotide
ccacacaccaucuuggcua

SEQ ID NO: 5520 - RNA, 19 nt, Artificial Sequence
  Description of Artificial Sequence: Synthetic oligonucleotide
cccacacaccaucuuggcu

SEQ ID NO: 5521 - RNA, 19 nt, Artificial Sequence
  Description of Artificial Sequence: Synthetic oligonucleotide
gcccacacaccaucuuggc

SEQ ID NO: 5522 - RNA, 19 nt, Artificial Sequence
  Description of Artificial Sequence: Synthetic oligonucleotide
ggcccacacaccaucuugg

SEQ ID NO: 5523 - RNA, 19 nt, Artificial Sequence
  Description of Artificial Sequence: Synthetic oligonucleotide
gggcccacacaccaucuug

SEQ ID NO: 5524 - RNA, 19 nt, Artificial Sequence
  Description of Artificial Sequence: Synthetic oligonucleotide
agggcccacacaccaucuu

SEQ ID NO: 5525 - RNA, 19 nt, Artificial Sequence
  Description of Artificial Sequence: Synthetic oligonucleotide
gagggcccacacaccaucu

SEQ ID NO: 5526 - RNA, 19 nt, Artificial Sequence
  Description of Artificial Sequence: Synthetic oligonucleotide
ugagggcccacacaccauc

SEQ ID NO: 5527 - RNA, 19 nt, Artificial Sequence
  Description of Artificial Sequence: Synthetic oligonucleotide
cugagggcccacacaccau

SEQ ID NO: 5528 - RNA, 19 nt, Artificial Sequence
  Description of Artificial Sequence: Synthetic oligonucleotide
ccugagggcccacacacca

SEQ ID NO: 5529 - RNA, 19 nt, Artificial Sequence
  Description of Artificial Sequence: Synthetic oligonucleotide
gccugagggcccacacacc

SEQ ID NO: 5530 - RNA, 19 nt, Artificial Sequence
  Description of Artificial Sequence: Synthetic oligonucleotide
agccugagggcccacacac

SEQ ID NO: 5531 - RNA, 19 nt, Artificial Sequence
  Description of Artificial Sequence: Synthetic oligonucleotide
gagccugagggcccacaca

SEQ ID NO: 5532 - RNA, 19 nt, Artificial Sequence
  Description of Artificial Sequence: Synthetic oligonucleotide
ggagccugagggcccacac

SEQ ID NO: 5533 - RNA, 19 nt, Artificial Sequence
  Description of Artificial Sequence: Synthetic oligonucleotide
gggagccugagggcccaca

SEQ ID NO: 5534 - RNA, 19 nt, Artificial Sequence
  Description of Artificial Sequence: Synthetic oligonucleotide
ugggagccugagggcccac

SEQ ID NO: 5535 - RNA, 19 nt, Artificial Sequence
  Description of Artificial Sequence: Synthetic oligonucleotide
cugggagccugagggccca

SEQ ID NO: 5536 - RNA, 19 nt, Artificial Sequence
  Description of Artificial Sequence: Synthetic oligonucleotide
gcugggagccugagggccc

SEQ ID NO: 5537 - RNA, 19 nt, Artificial Sequence
  Description of Artificial Sequence: Synthetic oligonucleotide
agcugggagccugagggcc

SEQ ID NO: 5538 - RNA, 19 nt, Artificial Sequence
  Description of Artificial Sequence: Synthetic oligonucleotide
aagcugggagccugagggc

SEQ ID NO: 5539 - RNA, 19 nt, Artificial Sequence
  Description of Artificial Sequence: Synthetic oligonucleotide
caagcugggagccugaggg

SEQ ID NO: 5540 - RNA, 19 nt, Artificial Sequence
  Description of Artificial Sequence: Synthetic oligonucleotide
acaagcugggagccugagg

SEQ ID NO: 5541 - RNA, 19 nt, Artificial Sequence
  Description of Artificial Sequence: Synthetic oligonucleotide
gacaagcugggagccugag

SEQ ID NO: 5542 - RNA, 19 nt, Artificial Sequence
  Description of Artificial Sequence: Synthetic oligonucleotide
ggacaagcugggagccuga

SEQ ID NO: 5543 - RNA, 19 nt, Artificial Sequence
  Description of Artificial Sequence: Synthetic oligonucleotide
aggacaagcugggagccug

SEQ ID NO: 5544 - RNA, 19 nt, Artificial Sequence
  Description of Artificial Sequence: Synthetic oligonucleotide
caggacaagcugggagccu

SEQ ID NO: 5545 - RNA, 19 nt, Artificial Sequence
  Description of Artificial Sequence: Synthetic oligonucleotide
gcaggacaagcugggagcc

SEQ ID NO: 5546 - RNA, 19 nt, Artificial Sequence
  Description of Artificial Sequence: Synthetic oligonucleotide
agcaggacaagcugggagc

SEQ ID NO: 5547 - RNA, 19 nt, Artificial Sequence
  Description of Artificial Sequence: Synthetic oligonucleotide
gagcaggacaagcugggag

SEQ ID NO: 5548 - RNA, 19 nt, Artificial Sequence
  Description of Artificial Sequence: Synthetic oligonucleotide
ugagcaggacaagcuggga

SEQ ID NO: 5549 - RNA, 19 nt, Artificial Sequence
  Description of Artificial Sequence: Synthetic oligonucleotide
uugagcaggacaagcuggg

SEQ ID NO: 5550 - RNA, 19 nt, Artificial Sequence
  Description of Artificial Sequence: Synthetic oligonucleotide
cuugagcaggacaagcugg

SEQ ID NO: 5551 - RNA, 19 nt, Artificial Sequence
  Description of Artificial Sequence: Synthetic oligonucleotide
gcuugagcaggacaagcug

SEQ ID NO: 5552 - RNA, 19 nt, Artificial Sequence
  Description of Artificial Sequence: Synthetic oligonucleotide
agcuugagcaggacaagcu

SEQ ID NO: 5553 - RNA, 19 nt, Artificial Sequence
  Description of Artificial Sequence: Synthetic oligonucleotide
cagcuugagcaggacaagc

SEQ ID NO: 5554 - RNA, 19 nt, Artificial Sequence
  Description of Artificial Sequence: Synthetic oligonucleotide
ccagcuugagcaggacaag

SEQ ID NO: 5555 - RNA, 19 nt, Artificial Sequence
  Description of Artificial Sequence: Synthetic oligonucleotide
uccagcuugagcaggacaa

SEQ ID NO: 5556 - RNA, 19 nt, Artificial Sequence
  Description of Artificial Sequence: Synthetic oligonucleotide
cuccagcuugagcaggaca

SEQ ID NO: 5557 - RNA, 19 nt, Artificial Sequence
  Description of Artificial Sequence: Synthetic oligonucleotide
ucuccagcuugagcaggac

SEQ ID NO: 5558 - RNA, 19 nt, Artificial Sequence
  Description of Artificial Sequence: Synthetic oligonucleotide
cucuccagcuugagcagga

SEQ ID NO: 5559 - RNA, 19 nt, Artificial Sequence
  Description of Artificial Sequence: Synthetic oligonucleotide
ucucuccagcuugagcagg

SEQ ID NO: 5560 - RNA, 19 nt, Artificial Sequence
  Description of Artificial Sequence: Synthetic oligonucleotide
aucucuccagcuugagcag

SEQ ID NO: 5561 - RNA, 19 nt, Artificial Sequence
  Description of Artificial Sequence: Synthetic oligonucleotide
gaucucuccagcuugagca

SEQ ID NO: 5562 - RNA, 19 nt, Artificial Sequence
  Description of Artificial Sequence: Synthetic oligonucleotide
agaucucuccagcuugagc

SEQ ID NO: 5563 - RNA, 19 nt, Artificial Sequence
  Description of Artificial Sequence: Synthetic oligonucleotide
cagaucucuccagcuugag

SEQ ID NO: 5564 - RNA, 19 nt, Artificial Sequence
  Description of Artificial Sequence: Synthetic oligonucleotide
acagaucucuccagcuuga

SEQ ID NO: 5565 - RNA, 19 nt, Artificial Sequence
  Description of Artificial Sequence: Synthetic oligonucleotide
cacagaucucuccagcuug

SEQ ID NO: 5566 - RNA, 19 nt, Artificial Sequence
  Description of Artificial Sequence: Synthetic oligonucleotide
ucacagaucucuccagcuu

SEQ ID NO: 5567 - RNA, 19 nt, Artificial Sequence
  Description of Artificial Sequence: Synthetic oligonucleotide
gucacagaucucuccagcu

SEQ ID NO: 5568 - RNA, 19 nt, Artificial Sequence
  Description of Artificial Sequence: Synthetic oligonucleotide
ggucacagaucucuccagc

SEQ ID NO: 5569 - RNA, 19 nt, Artificial Sequence
  Description of Artificial Sequence: Synthetic oligonucleotide
gggucacagaucucuccag

SEQ ID NO: 5570 - RNA, 19 nt, Artificial Sequence
  Description of Artificial Sequence: Synthetic oligonucleotide
agggucacagaucucucca

SEQ ID NO: 5571 - RNA, 19 nt, Artificial Sequence
  Description of Artificial Sequence: Synthetic oligonucleotide
cagggucacagaucucucc

SEQ ID NO: 5572 - RNA, 19 nt, Artificial Sequence
  Description of Artificial Sequence: Synthetic oligonucleotide
ucagggucacagaucucuc

SEQ ID NO: 5573 - RNA, 19 nt, Artificial Sequence
  Description of Artificial Sequence: Synthetic oligonucleotide
uucagggucacagaucucu

SEQ ID NO: 5574 - RNA, 19 nt, Artificial Sequence
  Description of Artificial Sequence: Synthetic oligonucleotide
guucagggucacagaucuc

SEQ ID NO: 5575 - RNA, 19 nt, Artificial Sequence
  Description of Artificial Sequence: Synthetic oligonucleotide
gguucagggucacagaucu

SEQ ID NO: 5576 - RNA, 19 nt, Artificial Sequence
  Description of Artificial Sequence: Synthetic oligonucleotide
ugguucagggucacagauc

SEQ ID NO: 5577 - RNA, 19 nt, Artificial Sequence
  Description of Artificial Sequence: Synthetic oligonucleotide
cugguucagggucacagau

SEQ ID NO: 5578 - RNA, 19 nt, Artificial Sequence
  Description of Artificial Sequence: Synthetic oligonucleotide
gcugguucagggucacaga

SEQ ID NO: 5579 - RNA, 19 nt, Artificial Sequence
  Description of Artificial Sequence: Synthetic oligonucleotide
cgcugguucagggucacag

SEQ ID NO: 5580 - RNA, 19 nt, Artificial Sequence
  Description of Artificial Sequence: Synthetic oligonucleotide
acgcugguucagggucaca

SEQ ID NO: 5581 - RNA, 19 nt, Artificial Sequence
  Description of Artificial Sequence: Synthetic oligonucleotide
cacgcugguucagggucac

SEQ ID NO: 5582 - RNA, 19 nt, Artificial Sequence
  Description of Artificial Sequence: Synthetic oligonucleotide
acacgcugguucaggguca

SEQ ID NO: 5583 - RNA, 19 nt, Artificial Sequence
  Description of Artificial Sequence: Synthetic oligonucleotide
cacacgcugguucaggguc

SEQ ID NO: 5584 - RNA, 19 nt, Artificial Sequence
  Description of Artificial Sequence: Synthetic oligonucleotide
ccacacgcugguucagggu

SEQ ID NO: 5585 - RNA, 19 nt, Artificial Sequence
  Description of Artificial Sequence: Synthetic oligonucleotide
gccacacgcugguucaggg

SEQ ID NO: 5586 - RNA, 19 nt, Artificial Sequence
  Description of Artificial Sequence: Synthetic oligonucleotide
ggccacacgcugguucagg

SEQ ID NO: 5587 - RNA, 19 nt, Artificial Sequence
  Description of Artificial Sequence: Synthetic oligonucleotide
gggccacacgcugguucag

SEQ ID NO: 5588 - RNA, 19 nt, Artificial Sequence
  Description of Artificial Sequence: Synthetic oligonucleotide
agggccacacgcugguuca

SEQ ID NO: 5589 - RNA, 19 nt, Artificial Sequence
  Description of Artificial Sequence: Synthetic oligonucleotide
cagggccacacgcugguuc

SEQ ID NO: 5590 - RNA, 19 nt, Artificial Sequence
  Description of Artificial Sequence: Synthetic oligonucleotide
ucagggccacacgcugguu

SEQ ID NO: 5591 - RNA, 19 nt, Artificial Sequence
  Description of Artificial Sequence: Synthetic oligonucleotide
aucagggccacacgcuggu

SEQ ID NO: 5592 - RNA, 19 nt, Artificial Sequence
  Description of Artificial Sequence: Synthetic oligonucleotide
gaucagggccacacgcugg

SEQ ID NO: 5593 - RNA, 19 nt, Artificial Sequence
  Description of Artificial Sequence: Synthetic oligonucleotide
agaucagggccacacgcug

SEQ ID NO: 5594 - RNA, 19 nt, Artificial Sequence
  Description of Artificial Sequence: Synthetic oligonucleotide
cagaucagggccacacgcu

SEQ ID NO: 5595 - RNA, 19 nt, Artificial Sequence
  Description of Artificial Sequence: Synthetic oligonucleotide
gcagaucagggccacacgc

SEQ ID NO: 5596 - RNA, 19 nt, Artificial Sequence
  Description of Artificial Sequence: Synthetic oligonucleotide
ggcagaucagggccacacg

SEQ ID NO: 5597 - RNA, 19 nt, Artificial Sequence
  Description of Artificial Sequence: Synthetic oligonucleotide
aggcagaucagggccacac

SEQ ID NO: 5598 - RNA, 19 nt, Artificial Sequence
  Description of Artificial Sequence: Synthetic oligonucleotide
caggcagaucagggccaca

SEQ ID NO: 5599 - RNA, 19 nt, Artificial Sequence
  Description of Artificial Sequence: Synthetic oligonucleotide
gcaggcagaucagggccac

SEQ ID NO: 5600 - RNA, 19 nt, Artificial Sequence
  Description of Artificial Sequence: Synthetic oligonucleotide
ggcaggcagaucagggcca

SEQ ID NO: 5601 - RNA, 19 nt, Artificial Sequence
  Description of Artificial Sequence: Synthetic oligonucleotide
gggcaggcagaucagggcc

SEQ ID NO: 5602 - RNA, 19 nt, Artificial Sequence
  Description of Artificial Sequence: Synthetic oligonucleotide
ggggcaggcagaucagggc

SEQ ID NO: 5603 - RNA, 19 nt, Artificial Sequence
  Description of Artificial Sequence: Synthetic oligonucleotide
gggggcaggcagaucaggg

SEQ ID NO: 5604 - RNA, 19 nt, Artificial Sequence
  Description of Artificial Sequence: Synthetic oligonucleotide
agggggcaggcagaucagg

SEQ ID NO: 5605 - RNA, 19 nt, Artificial Sequence
  Description of Artificial Sequence: Synthetic oligonucleotide
cagggggcaggcagaucag

SEQ ID NO: 5606 - RNA, 19 nt, Artificial Sequence
  Description of Artificial Sequence: Synthetic oligonucleotide
ucagggggcaggcagauca

SEQ ID NO: 5607 - RNA, 19 nt, Artificial Sequence
  Description of Artificial Sequence: Synthetic oligonucleotide
uucagggggcaggcagauc

SEQ ID NO: 5608 - RNA, 19 nt, Artificial Sequence
  Description of Artificial Sequence: Synthetic oligonucleotide
auucagggggcaggcagau

SEQ ID NO: 5609 - RNA, 19 nt, Artificial Sequence
  Description of Artificial Sequence: Synthetic oligonucleotide
cauucagggggcaggcaga

SEQ ID NO: 5610 - RNA, 19 nt, Artificial Sequence
  Description of Artificial Sequence: Synthetic oligonucleotide
ccauucagggggcaggcag

SEQ ID NO: 5611 - RNA, 19 nt, Artificial Sequence
  Description of Artificial Sequence: Synthetic oligonucleotide
accauucagggggcaggca

SEQ ID NO: 5612 - RNA, 19 nt, Artificial Sequence
  Description of Artificial Sequence: Synthetic oligonucleotide
uaccauucagggggcaggc

SEQ ID NO: 5613 - RNA, 19 nt, Artificial Sequence
  Description of Artificial Sequence: Synthetic oligonucleotide
auaccauucagggggcagg

SEQ ID NO: 5614 - RNA, 19 nt, Artificial Sequence
  Description of Artificial Sequence: Synthetic oligonucleotide
cauaccauucagggggcag

SEQ ID NO: 5615 - RNA, 19 nt, Artificial Sequence
  Description of Artificial Sequence: Synthetic oligonucleotide
acauaccauucagggggca

SEQ ID NO: 5616 - RNA, 19 nt, Artificial Sequence
  Description of Artificial Sequence: Synthetic oligonucleotide
cacauaccauucagggggc

SEQ ID NO: 5617 - RNA, 19 nt, Artificial Sequence
  Description of Artificial Sequence: Synthetic oligonucleotide
ccacauaccauucaggggg

SEQ ID NO: 5618 - RNA, 19 nt, Artificial Sequence
  Description of Artificial Sequence: Synthetic oligonucleotide
accacauaccauucagggg

SEQ ID NO: 5619 - RNA, 19 nt, Artificial Sequence
  Description of Artificial Sequence: Synthetic oligonucleotide
caccacauaccauucaggg

SEQ ID NO: 5620 - RNA, 19 nt, Artificial Sequence
  Description of Artificial Sequence: Synthetic oligonucleotide
gcaccacauaccauucagg

SEQ ID NO: 5621 - RNA, 19 nt, Artificial Sequence
  Description of Artificial Sequence: Synthetic oligonucleotide
ggcaccacauaccauucag

SEQ ID NO: 5622 - RNA, 19 nt, Artificial Sequence
  Description of Artificial Sequence: Synthetic oligonucleotide
aggcaccacauaccauuca

SEQ ID NO: 5623 - RNA, 19 nt, Artificial Sequence
  Description of Artificial Sequence: Synthetic oligonucleotide
gaggcaccacauaccauuc

SEQ ID NO: 5624 - RNA, 19 nt, Artificial Sequence
  Description of Artificial Sequence: Synthetic oligonucleotide
ggaggcaccacauaccauu

SEQ ID NO: 5625 - RNA, 19 nt, Artificial Sequence
  Description of Artificial Sequence: Synthetic oligonucleotide
uggaggcaccacauaccau

SEQ ID NO: 5626 - RNA, 19 nt, Artificial Sequence
  Description of Artificial Sequence: Synthetic oligonucleotide
cuggaggcaccacauacca

SEQ ID NO: 5627 - RNA, 19 nt, Artificial Sequence
  Description of Artificial Sequence: Synthetic oligonucleotide
ccuggaggcaccacauacc

SEQ ID NO: 5628 - RNA, 19 nt, Artificial Sequence
  Description of Artificial Sequence: Synthetic oligonucleotide
cccuggaggcaccacauac

SEQ ID NO: 5629 - RNA, 19 nt, Artificial Sequence
  Description of Artificial Sequence: Synthetic oligonucleotide
ucccuggaggcaccacaua

SEQ ID NO: 5630 - RNA, 19 nt, Artificial Sequence
  Description of Artificial Sequence: Synthetic oligonucleotide
gucccuggaggcaccacau

SEQ ID NO: 5631 - RNA, 19 nt, Artificial Sequence
  Description of Artificial Sequence: Synthetic oligonucleotide
ggucccuggaggcaccaca

SEQ ID NO: 5632 - RNA, 19 nt, Artificial Sequence
  Description of Artificial Sequence: Synthetic oligonucleotide
uggucccuggaggcaccac

SEQ ID NO: 5633 - RNA, 19 nt, Artificial Sequence
  Description of Artificial Sequence: Synthetic oligonucleotide
uuggucccuggaggcacca

SEQ ID NO: 5634 - RNA, 19 nt, Artificial Sequence
  Description of Artificial Sequence: Synthetic oligonucleotide
cuuggucccuggaggcacc

SEQ ID NO: 5635 - RNA, 19 nt, Artificial Sequence
  Description of Artificial Sequence: Synthetic oligonucleotide
acuuggucccuggaggcac

SEQ ID NO: 5636 - RNA, 19 nt, Artificial Sequence
  Description of Artificial Sequence: Synthetic oligonucleotide
cacuuggucccuggaggca

SEQ ID NO: 5637 - RNA, 19 nt, Artificial Sequence
  Description of Artificial Sequence: Synthetic oligonucleotide
acacuuggucccuggaggc

SEQ ID NO: 5638 - RNA, 19 nt, Artificial Sequence
  Description of Artificial Sequence: Synthetic oligonucleotide
cacacuuggucccuggagg

SEQ ID NO: 5639 - RNA, 19 nt, Artificial Sequence
  Description of Artificial Sequence: Synthetic oligonucleotide
ucacacuuggucccuggag

SEQ ID NO: 5640 - RNA, 19 nt, Artificial Sequence
  Description of Artificial Sequence: Synthetic oligonucleotide
cucacacuuggucccugga

SEQ ID NO: 5641 - RNA, 19 nt, Artificial Sequence
  Description of Artificial Sequence: Synthetic oligonucleotide
ucucacacuuggucccugg

SEQ ID NO: 5642 - RNA, 19 nt, Artificial Sequence
  Description of Artificial Sequence: Synthetic oligonucleotide
aucucacacuuggucccug

SEQ ID NO: 5643 - RNA, 19 nt, Artificial Sequence
  Description of Artificial Sequence: Synthetic oligonucleotide
aaucucacacuuggucccu

SEQ ID NO: 5644 - RNA, 19 nt, Artificial Sequence
  Description of Artificial Sequence: Synthetic oligonucleotide
caaucucacacuugguccc

SEQ ID NO: 5645 - RNA, 19 nt, Artificial Sequence
  Description of Artificial Sequence: Synthetic oligonucleotide
gcaaucucacacuuggucc

SEQ ID NO: 5646 - RNA, 19 nt, Artificial Sequence
  Description of Artificial Sequence: Synthetic oligonucleotide
ugcaaucucacacuugguc

SEQ ID NO: 5647 - RNA, 19 nt, Artificial Sequence
  Description of Artificial Sequence: Synthetic oligonucleotide
cugcaaucucacacuuggu

SEQ ID NO: 5648 - RNA, 19 nt, Artificial Sequence
  Description of Artificial Sequence: Synthetic oligonucleotide
ccugcaaucucacacuugg

SEQ ID NO: 5649 - RNA, 19 nt, Artificial Sequence
  Description of Artificial Sequence: Synthetic oligonucleotide
gccugcaaucucacacuug

SEQ ID NO: 5650 - RNA, 19 nt, Artificial Sequence
  Description of Artificial Sequence: Synthetic oligonucleotide
agccugcaaucucacacuu

SEQ ID NO: 5651 - RNA, 19 nt, Artificial Sequence
  Description of Artificial Sequence: Synthetic oligonucleotide
cagccugcaaucucacacu

SEQ ID NO: 5652 - RNA, 19 nt, Artificial Sequence
  Description of Artificial Sequence: Synthetic oligonucleotide
ccagccugcaaucucacac

SEQ ID NO: 5653 - RNA, 19 nt, Artificial Sequence
  Description of Artificial Sequence: Synthetic oligonucleotide
cccagccugcaaucucaca

SEQ ID NO: 5654 - RNA, 19 nt, Artificial Sequence
  Description of Artificial Sequence: Synthetic oligonucleotide
ccccagccugcaaucucac

SEQ ID NO: 5655 - RNA, 19 nt, Artificial Sequence
  Description of Artificial Sequence: Synthetic oligonucleotide
accccagccugcaaucuca

SEQ ID NO: 5656 - RNA, 19 nt, Artificial Sequence
  Description of Artificial Sequence: Synthetic oligonucleotide
caccccagccugcaaucuc

SEQ ID NO: 5657 - RNA, 19 nt, Artificial Sequence
  Description of Artificial Sequence: Synthetic oligonucleotide
ucaccccagccugcaaucu

SEQ ID NO: 5658 - RNA, 19 nt, Artificial Sequence
  Description of Artificial Sequence: Synthetic oligonucleotide
cucaccccagccugcaauc

SEQ ID NO: 5659 - RNA, 19 nt, Artificial Sequence
  Description of Artificial Sequence: Synthetic oligonucleotide
ucucaccccagccugcaau

SEQ ID NO: 5660 - RNA, 19 nt, Artificial Sequence
  Description of Artificial Sequence: Synthetic oligonucleotide
gucucaccccagccugcaa

SEQ ID NO: 5661 - RNA, 19 nt, Artificial Sequence
  Description of Artificial Sequence: Synthetic oligonucleotide
ggucucaccccagccugca

SEQ ID NO: 5662 - RNA, 19 nt, Artificial Sequence
  Description of Artificial Sequence: Synthetic oligonucleotide
uggucucaccccagccugc

SEQ ID NO: 5663 - RNA, 19 nt, Artificial Sequence
  Description of Artificial Sequence: Synthetic oligonucleotide
uuggucucaccccagccug

SEQ ID NO: 5664 - RNA, 19 nt, Artificial Sequence
  Description of Artificial Sequence: Synthetic oligonucleotide
uuuggucucaccccagccu

SEQ ID NO: 5665 - RNA, 19 nt, Artificial Sequence
  Description of Artificial Sequence: Synthetic oligonucleotide
cuuuggucucaccccagcc

SEQ ID NO: 5666 - RNA, 19 nt, Artificial Sequence
  Description of Artificial Sequence: Synthetic oligonucleotide
ccuuuggucucaccccagc

SEQ ID NO: 5667 - RNA, 19 nt, Artificial Sequence
  Description of Artificial Sequence: Synthetic oligonucleotide
accuuuggucucaccccag

SEQ ID NO: 5668 - RNA, 19 nt, Artificial Sequence
  Description of Artificial Sequence: Synthetic oligonucleotide
uaccuuuggucucacccca

SEQ ID NO: 5669 - RNA, 19 nt, Artificial Sequence
  Description of Artificial Sequence: Synthetic oligonucleotide
guaccuuuggucucacccc

SEQ ID NO: 5670 - RNA, 19 nt, Artificial Sequence
  Description of Artificial Sequence: Synthetic oligonucleotide
cguaccuuuggucucaccc

SEQ ID NO: 5671 - RNA, 19 nt, Artificial Sequence
  Description of Artificial Sequence: Synthetic oligonucleotide
ccguaccuuuggucucacc

SEQ ID NO: 5672 - RNA, 19 nt, Artificial Sequence
  Description of Artificial Sequence: Synthetic oligonucleotide
cccguaccuuuggucucac

SEQ ID NO: 5673 - RNA, 19 nt, Artificial Sequence
  Description of Artificial Sequence: Synthetic oligonucleotide
acccguaccuuuggucuca

SEQ ID NO: 5674 - RNA, 19 nt, Artificial Sequence
  Description of Artificial Sequence: Synthetic oligonucleotide
uacccguaccuuuggucuc

SEQ ID NO: 5675 - RNA, 19 nt, Artificial Sequence
  Description of Artificial Sequence: Synthetic oligonucleotide
uuacccguaccuuuggucu

SEQ ID NO: 5676 - RNA, 19 nt, Artificial Sequence
  Description of Artificial Sequence: Synthetic oligonucleotide
auuacccguaccuuugguc

SEQ ID NO: 5677 - RNA, 19 nt, Artificial Sequence
  Description of Artificial Sequence: Synthetic oligonucleotide
cauuacccguaccuuuggu

SEQ ID NO: 5678 - RNA, 19 nt, Artificial Sequence
  Description of Artificial Sequence: Synthetic oligonucleotide
ucauuacccguaccuuugg

SEQ ID NO: 5679 - RNA, 19 nt, Artificial Sequence
  Description of Artificial Sequence: Synthetic oligonucleotide
gucauuacccguaccuuug

SEQ ID NO: 5680 - RNA, 19 nt, Artificial Sequence
  Description of Artificial Sequence: Synthetic oligonucleotide
ugucauuacccguaccuuu

SEQ ID NO: 5681 - RNA, 19 nt, Artificial Sequence
  Description of Artificial Sequence: Synthetic oligonucleotide
gugucauuacccguaccuu

SEQ ID NO: 5682 - RNA, 19 nt, Artificial Sequence
  Description of Artificial Sequence: Synthetic oligonucleotide
ugugucauuacccguaccu

SEQ ID NO: 5683 - RNA, 19 nt, Artificial Sequence
  Description of Artificial Sequence: Synthetic oligonucleotide
cugugucauuacccguacc

SEQ ID NO: 5684 - RNA, 19 nt, Artificial Sequence
  Description of Artificial Sequence: Synthetic oligonucleotide
acugugucauuacccguac

SEQ ID NO: 5685 - RNA, 19 nt, Artificial Sequence
  Description of Artificial Sequence: Synthetic oligonucleotide
gacugugucauuacccgua

SEQ ID NO: 5686 - RNA, 19 nt, Artificial Sequence
  Description of Artificial Sequence: Synthetic oligonucleotide
ggacugugucauuacccgu

SEQ ID NO: 5687 - RNA, 19 nt, Artificial Sequence
  Description of Artificial Sequence: Synthetic oligonucleotide
aggacugugucauuacccg

SEQ ID NO: 5688 - RNA, 19 nt, Artificial Sequence
  Description of Artificial Sequence: Synthetic oligonucleotide
uaggacugugucauuaccc

SEQ ID NO: 5689 - RNA, 19 nt, Artificial Sequence
  Description of Artificial Sequence: Synthetic oligonucleotide
uuaggacugugucauuacc

SEQ ID NO: 5690 - RNA, 19 nt, Artificial Sequence
  Description of Artificial Sequence: Synthetic oligonucleotide
uuuaggacugugucauuac

SEQ ID NO: 5691 - RNA, 19 nt, Artificial Sequence
  Description of Artificial Sequence: Synthetic oligonucleotide
auuuaggacugugucauua

SEQ ID NO: 5692 - RNA, 19 nt, Artificial Sequence
  Description of Artificial Sequence: Synthetic oligonucleotide
cauuuaggacugugucauu

SEQ ID NO: 5693 - RNA, 19 nt, Artificial Sequence
  Description of Artificial Sequence: Synthetic oligonucleotide
acauuuaggacugugucau

SEQ ID NO: 5694 - RNA, 19 nt, Artificial Sequence
  Description of Artificial Sequence: Synthetic oligonucleotide
cacauuuaggacuguguca

SEQ ID NO: 5695 - RNA, 19 nt, Artificial Sequence
  Description of Artificial Sequence: Synthetic oligonucleotide
ccacauuuaggacuguguc

SEQ ID NO: 5696 - RNA, 19 nt, Artificial Sequence
  Description of Artificial Sequence: Synthetic oligonucleotide
gccacauuuaggacugugu

SEQ ID NO: 5697 - RNA, 19 nt, Artificial Sequence
  Description of Artificial Sequence: Synthetic oligonucleotide
ggccacauuuaggacugug

SEQ ID NO: 5698 - RNA, 19 nt, Artificial Sequence
  Description of Artificial Sequence: Synthetic oligonucleotide
aggccacauuuaggacugu

SEQ ID NO: 5699 - RNA, 19 nt, Artificial Sequence
  Description of Artificial Sequence: Synthetic oligonucleotide
aaggccacauuuaggacug

SEQ ID NO: 5700 - RNA, 19 nt, Artificial Sequence
  Description of Artificial Sequence: Synthetic oligonucleotide
caaggccacauuuaggacu

SEQ ID NO: 5701 - RNA, 19 nt, Artificial Sequence
  Description of Artificial Sequence: Synthetic oligonucleotide
gcaaggccacauuuaggac

SEQ ID NO: 5702 - RNA, 19 nt, Artificial Sequence
  Description of Artificial Sequence: Synthetic oligonucleotide
agcaaggccacauuuagga

SEQ ID NO: 5703 - RNA, 19 nt, Artificial Sequence
  Description of Artificial Sequence: Synthetic oligonucleotide
cagcaaggccacauuuagg

SEQ ID NO: 5704 - RNA, 19 nt, Artificial Sequence
  Description of Artificial Sequence: Synthetic oligonucleotide
ucagcaaggccacauuuag

SEQ ID NO: 5705 - RNA, 19 nt, Artificial Sequence
  Description of Artificial Sequence: Synthetic oligonucleotide
uucagcaaggccacauuua

SEQ ID NO: 5706 - RNA, 19 nt, Artificial Sequence
  Description of Artificial Sequence: Synthetic oligonucleotide
auucagcaaggccacauuu

SEQ ID NO: 5707 - RNA, 19 nt, Artificial Sequence
  Description of Artificial Sequence: Synthetic oligonucleotide
cauucagcaaggccacauu

SEQ ID NO: 5708 - RNA, 19 nt, Artificial Sequence
  Description of Artificial Sequence: Synthetic oligonucleotide
acauucagcaaggccacau

SEQ ID NO: 5709 - RNA, 19 nt, Artificial Sequence
  Description of Artificial Sequence: Synthetic oligonucleotide
gacauucagcaaggccaca

SEQ ID NO: 5710 - RNA, 19 nt, Artificial Sequence
  Description of Artificial Sequence: Synthetic oligonucleotide
ugacauucagcaaggccac

SEQ ID NO: 5711 - RNA, 19 nt, Artificial Sequence
  Description of Artificial Sequence: Synthetic oligonucleotide
augacauucagcaaggcca

SEQ ID NO: 5712 - RNA, 19 nt, Artificial Sequence
  Description of Artificial Sequence: Synthetic oligonucleotide
gaugacauucagcaaggcc

SEQ ID NO: 5713 - RNA, 19 nt, Artificial Sequence
  Description of Artificial Sequence: Synthetic oligonucleotide
agaugacauucagcaaggc

SEQ ID NO: 5714 - RNA, 19 nt, Artificial Sequence
  Description of Artificial Sequence: Synthetic oligonucleotide
gagaugacauucagcaagg

SEQ ID NO: 5715 - RNA, 19 nt, Artificial Sequence
  Description of Artificial Sequence: Synthetic oligonucleotide
ggagaugacauucagcaag

SEQ ID NO: 5716 - RNA, 19 nt, Artificial Sequence
  Description of Artificial Sequence: Synthetic oligonucleotide
uggagaugacauucagcaa

SEQ ID NO: 5717 - RNA, 19 nt, Artificial Sequence
  Description of Artificial Sequence: Synthetic oligonucleotide
uuggagaugacauucagca

SEQ ID NO: 5718 - RNA, 19 nt, Artificial Sequence
  Description of Artificial Sequence: Synthetic oligonucleotide
guuggagaugacauucagc

SEQ ID NO: 5719 - RNA, 19 nt, Artificial Sequence
  Description of Artificial Sequence: Synthetic oligonucleotide
gguuggagaugacauucag

SEQ ID NO: 5720 - RNA, 19 nt, Artificial Sequence
  Description of Artificial Sequence: Synthetic oligonucleotide
ugguuggagaugacauuca

SEQ ID NO: 5721 - RNA, 19 nt, Artificial Sequence
  Description of Artificial Sequence: Synthetic oligonucleotide
cugguuggagaugacauuc

SEQ ID NO: 5722 - RNA, 19 nt, Artificial Sequence
  Description of Artificial Sequence: Synthetic oligonucleotide
ccugguuggagaugacauu

SEQ ID NO: 5723 - RNA, 19 nt, Artificial Sequence
  Description of Artificial Sequence: Synthetic oligonucleotide
uccugguuggagaugacau

SEQ ID NO: 5724 - RNA, 19 nt, Artificial Sequence
  Description of Artificial Sequence: Synthetic oligonucleotide
cuccugguuggagaugaca

SEQ ID NO: 5725 - RNA, 19 nt, Artificial Sequence
  Description of Artificial Sequence: Synthetic oligonucleotide
acuccugguuggagaugac

SEQ ID NO: 5726 - RNA, 19 nt, Artificial Sequence
  Description of Artificial Sequence: Synthetic oligonucleotide
cacuccugguuggagauga

SEQ ID NO: 5727 - RNA, 19 nt, Artificial Sequence
  Description of Artificial Sequence: Synthetic oligonucleotide
acacuccugguuggagaug

SEQ ID NO: 5728 - RNA, 19 nt, Artificial Sequence
  Description of Artificial Sequence: Synthetic oligonucleotide
uacacuccugguuggagau

SEQ ID NO: 5729 - RNA, 19 nt, Artificial Sequence
  Description of Artificial Sequence: Synthetic oligonucleotide
uuacacuccugguuggaga

SEQ ID NO: 5730 - RNA, 19 nt, Artificial Sequence
  Description of Artificial Sequence: Synthetic oligonucleotide
guuacacuccugguuggag

SEQ ID NO: 5731 - RNA, 19 nt, Artificial Sequence
  Description of Artificial Sequence: Synthetic oligonucleotide
uguuacacuccugguugga

SEQ ID NO: 5732 - RNA, 19 nt, Artificial Sequence
  Description of Artificial Sequence: Synthetic oligonucleotide
auguuacacuccugguugg

SEQ ID NO: 5733 - RNA, 19 nt, Artificial Sequence
  Description of Artificial Sequence: Synthetic oligonucleotide
gauguuacacuccugguug

SEQ ID NO: 5734 - RNA, 19 nt, Artificial Sequence
  Description of Artificial Sequence: Synthetic oligonucleotide
ugauguuacacuccugguu

SEQ ID NO: 5735 - RNA, 19 nt, Artificial Sequence
  Description of Artificial Sequence: Synthetic oligonucleotide
uugauguuacacuccuggu

SEQ ID NO: 5736 - RNA, 19 nt, Artificial Sequence
  Description of Artificial Sequence: Synthetic oligonucleotide
cuugauguuacacuccugg

SEQ ID NO: 5737 - RNA, 19 nt, Artificial Sequence
  Description of Artificial Sequence: Synthetic oligonucleotide
gcuugauguuacacuccug

SEQ ID NO: 5738 - RNA, 19 nt, Artificial Sequence
  Description of Artificial Sequence: Synthetic oligonucleotide
ugcuugauguuacacuccu

SEQ ID NO: 5739 - RNA, 19 nt, Artificial Sequence
  Description of Artificial Sequence: Synthetic oligonucleotide
gugcuugauguuacacucc

SEQ ID NO: 5740 - RNA, 19 nt, Artificial Sequence
  Description of Artificial Sequence: Synthetic oligonucleotide
ggugcuugauguuacacuc

SEQ ID NO: 5741 - RNA, 19 nt, Artificial Sequence
  Description of Artificial Sequence: Synthetic oligonucleotide
cggugcuugauguuacacu

SEQ ID NO: 5742 - RNA, 19 nt, Artificial Sequence
  Description of Artificial Sequence: Synthetic oligonucleotide
ucggugcuugauguuacac

SEQ ID NO: 5743 - RNA, 19 nt, Artificial Sequence
  Description of Artificial Sequence: Synthetic oligonucleotide
cucggugcuugauguuaca

SEQ ID NO: 5744 - RNA, 19 nt, Artificial Sequence
  Description of Artificial Sequence: Synthetic oligonucleotide
ccucggugcuugauguuac

SEQ ID NO: 5745 - RNA, 19 nt, Artificial Sequence
  Description of Artificial Sequence: Synthetic oligonucleotide
uccucggugcuugauguua

SEQ ID NO: 5746 - RNA, 19 nt, Artificial Sequence
  Description of Artificial Sequence: Synthetic oligonucleotide
guccucggugcuugauguu

SEQ ID NO: 5747 - RNA, 19 nt, Artificial Sequence
  Description of Artificial Sequence: Synthetic oligonucleotide
cguccucggugcuugaugu

SEQ ID NO: 5748 - RNA, 19 nt, Artificial Sequence
  Description of Artificial Sequence: Synthetic oligonucleotide
acguccucggugcuugaug

SEQ ID NO: 5749 - RNA, 19 nt, Artificial Sequence
  Description of Artificial Sequence: Synthetic oligonucleotide
cacguccucggugcuugau

SEQ ID NO: 5750 - RNA, 19 nt, Artificial Sequence
  Description of Artificial Sequence: Synthetic oligonucleotide
acacguccucggugcuuga

SEQ ID NO: 5751 - RNA, 19 nt, Artificial Sequence
  Description of Artificial Sequence: Synthetic oligonucleotide
cacacguccucggugcuug

SEQ ID NO: 5752 - RNA, 19 nt, Artificial Sequence
  Description of Artificial Sequence: Synthetic oligonucleotide
gcacacguccucggugcuu

SEQ ID NO: 5753 - RNA, 19 nt, Artificial Sequence
  Description of Artificial Sequence: Synthetic oligonucleotide
cgcacacguccucggugcu

SEQ ID NO: 5754 - RNA, 19 nt, Artificial Sequence
  Description of Artificial Sequence: Synthetic oligonucleotide
ccgcacacguccucggugc

SEQ ID NO: 5755 - RNA, 19 nt, Artificial Sequence
  Description of Artificial Sequence: Synthetic oligonucleotide
cccgcacacguccucggug

SEQ ID NO: 5756 - RNA, 19 nt, Artificial Sequence
  Description of Artificial Sequence: Synthetic oligonucleotide
ucccgcacacguccucggu

SEQ ID NO: 5757 - RNA, 19 nt, Artificial Sequence
  Description of Artificial Sequence: Synthetic oligonucleotide
cucccgcacacguccucgg

SEQ ID NO: 5758 - RNA, 19 nt, Artificial Sequence
  Description of Artificial Sequence: Synthetic oligonucleotide
ucucccgcacacguccucg

SEQ ID NO: 5759 - RNA, 19 nt, Artificial Sequence
  Description of Artificial Sequence: Synthetic oligonucleotide
cucucccgcacacguccuc

SEQ ID NO: 5760 - RNA, 19 nt, Artificial Sequence
  Description of Artificial Sequence: Synthetic oligonucleotide
acucucccgcacacguccu

SEQ ID NO: 5761 - RNA, 19 nt, Artificial Sequence
  Description of Artificial Sequence: Synthetic oligonucleotide
cacucucccgcacacgucc

SEQ ID NO: 5762 - RNA, 19 nt, Artificial Sequence
  Description of Artificial Sequence: Synthetic oligonucleotide
ucacucucccgcacacguc

SEQ ID NO: 5763 - RNA, 19 nt, Artificial Sequence
  Description of Artificial Sequence: Synthetic oligonucleotide
cucacucucccgcacacgu

SEQ ID NO: 5764 - RNA, 19 nt, Artificial Sequence
  Description of Artificial Sequence: Synthetic oligonucleotide
ucucacucucccgcacacg

SEQ ID NO: 5765 - RNA, 19 nt, Artificial Sequence
  Description of Artificial Sequence: Synthetic oligonucleotide
aucucacucucccgcacac

SEQ ID NO: 5766 - RNA, 19 nt, Artificial Sequence
  Description of Artificial Sequence: Synthetic oligonucleotide
caucucacucucccgcaca

SEQ ID NO: 5767 - RNA, 19 nt, Artificial Sequence
  Description of Artificial Sequence: Synthetic oligonucleotide
acaucucacucucccgcac

SEQ ID NO: 5768 - RNA, 19 nt, Artificial Sequence
  Description of Artificial Sequence: Synthetic oligonucleotide
cacaucucacucucccgca

SEQ ID NO: 5769 - RNA, 19 nt, Artificial Sequence
  Description of Artificial Sequence: Synthetic oligonucleotide
gcacaucucacucucccgc

SEQ ID NO: 5770 - RNA, 19 nt, Artificial Sequence
  Description of Artificial Sequence: Synthetic oligonucleotide
ugcacaucucacucucccg

SEQ ID NO: 5771 - RNA, 19 nt, Artificial Sequence
  Description of Artificial Sequence: Synthetic oligonucleotide
gugcacaucucacucuccc

SEQ ID NO: 5772 - RNA, 19 nt, Artificial Sequence
  Description of Artificial Sequence: Synthetic oligonucleotide
agugcacaucucacucucc

SEQ ID NO: 5773 - RNA, 19 nt, Artificial Sequence
  Description of Artificial Sequence: Synthetic oligonucleotide
cagugcacaucucacucuc

SEQ ID NO: 5774 - RNA, 19 nt, Artificial Sequence
  Description of Artificial Sequence: Synthetic oligonucleotide
ucagugcacaucucacucu

SEQ ID NO: 5775 - RNA, 19 nt, Artificial Sequence
  Description of Artificial Sequence: Synthetic oligonucleotide
cucagugcacaucucacuc

SEQ ID NO: 5776 - RNA, 19 nt, Artificial Sequence
  Description of Artificial Sequence: Synthetic oligonucleotide
ccucagugcacaucucacu

SEQ ID NO: 5777 - RNA, 19 nt, Artificial Sequence
  Description of Artificial Sequence: Synthetic oligonucleotide
cccucagugcacaucucac

SEQ ID NO: 5778 - RNA, 19 nt, Artificial Sequence
  Description of Artificial Sequence: Synthetic oligonucleotide
ucccucagugcacaucuca

SEQ ID NO: 5779 - RNA, 19 nt, Artificial Sequence
  Description of Artificial Sequence: Synthetic oligonucleotide
gucccucagugcacaucuc

SEQ ID NO: 5780 - RNA, 19 nt, Artificial Sequence
  Description of Artificial Sequence: Synthetic oligonucleotide
agucccucagugcacaucu

SEQ ID NO: 5781 - RNA, 19 nt, Artificial Sequence
  Description of Artificial Sequence: Synthetic oligonucleotide
cagucccucagugcacauc

SEQ ID NO: 5782 - RNA, 19 nt, Artificial Sequence
  Description of Artificial Sequence: Synthetic oligonucleotide
acagucccucagugcacau

SEQ ID NO: 5783 - RNA, 19 nt, Artificial Sequence
  Description of Artificial Sequence: Synthetic oligonucleotide
aacagucccucagugcaca

SEQ ID NO: 5784 - RNA, 19 nt, Artificial Sequence
  Description of Artificial Sequence: Synthetic oligonucleotide
caacagucccucagugcac

SEQ ID NO: 5785 - RNA, 19 nt, Artificial Sequence
  Description of Artificial Sequence: Synthetic oligonucleotide
ccaacagucccucagugca

SEQ ID NO: 5786 - RNA, 19 nt, Artificial Sequence
  Description of Artificial Sequence: Synthetic oligonucleotide
gccaacagucccucagugc

SEQ ID NO: 5787 - RNA, 19 nt, Artificial Sequence
  Description of Artificial Sequence: Synthetic oligonucleotide
ggccaacagucccucagug

SEQ ID NO: 5788 - RNA, 19 nt, Artificial Sequence
  Description of Artificial Sequence: Synthetic oligonucleotide
gggccaacagucccucagu

SEQ ID NO: 5789 - RNA, 19 nt, Artificial Sequence
  Description of Artificial Sequence: Synthetic oligonucleotide
ggggccaacagucccucag

SEQ ID NO: 5790 - RNA, 19 nt, Artificial Sequence
  Description of Artificial Sequence: Synthetic oligonucleotide
aggggccaacagucccuca

SEQ ID NO: 5791 - RNA, 19 nt, Artificial Sequence
  Description of Artificial Sequence: Synthetic oligonucleotide
caggggccaacagucccuc

SEQ ID NO: 5792 - RNA, 19 nt, Artificial Sequence
  Description of Artificial Sequence: Synthetic oligonucleotide
acaggggccaacagucccu

SEQ ID NO: 5793 - RNA, 19 nt, Artificial Sequence
  Description of Artificial Sequence: Synthetic oligonucleotide
cacaggggccaacaguccc

SEQ ID NO: 5794 - RNA, 19 nt, Artificial Sequence
  Description of Artificial Sequence: Synthetic oligonucleotide
ccacaggggccaacagucc

SEQ ID NO: 5795 - RNA, 19 nt, Artificial Sequence
  Description of Artificial Sequence: Synthetic oligonucleotide
cccacaggggccaacaguc

SEQ ID NO: 5796 - RNA, 19 nt, Artificial Sequence
  Description of Artificial Sequence: Synthetic oligonucleotide
ccccacaggggccaacagu

SEQ ID NO: 5797 - RNA, 19 nt, Artificial Sequence
  Description of Artificial Sequence: Synthetic oligonucleotide
cccccacaggggccaacag

SEQ ID NO: 5798 - RNA, 19 nt, Artificial Sequence
  Description of Artificial Sequence: Synthetic oligonucleotide
gcccccacaggggccaaca

SEQ ID NO: 5799 - RNA, 19 nt, Artificial Sequence
  Description of Artificial Sequence: Synthetic oligonucleotide
ggcccccacaggggccaac

SEQ ID NO: 5800 - RNA, 19 nt, Artificial Sequence
  Description of Artificial Sequence: Synthetic oligonucleotide
aggcccccacaggggccaa

SEQ ID NO: 5801 - RNA, 19 nt, Artificial Sequence
  Description of Artificial Sequence: Synthetic oligonucleotide
caggcccccacaggggcca

SEQ ID NO: 5802 - RNA, 19 nt, Artificial Sequence
  Description of Artificial Sequence: Synthetic oligonucleotide
acaggcccccacaggggcc

SEQ ID NO: 5803 - RNA, 19 nt, Artificial Sequence
  Description of Artificial Sequence: Synthetic oligonucleotide
cacaggcccccacaggggc

SEQ ID NO: 5804 - RNA, 19 nt, Artificial Sequence
  Description of Artificial Sequence: Synthetic oligonucleotide
ucacaggcccccacagggg

SEQ ID NO: 5805 - RNA, 19 nt, Artificial Sequence
  Description of Artificial Sequence: Synthetic oligonucleotide
cucacaggcccccacaggg

SEQ ID NO: 5806 - RNA, 19 nt, Artificial Sequence
  Description of Artificial Sequence: Synthetic oligonucleotide
ccucacaggcccccacagg

SEQ ID NO: 5807 - RNA, 19 nt, Artificial Sequence
  Description of Artificial Sequence: Synthetic oligonucleotide
cccucacaggcccccacag

SEQ ID NO: 5808 - RNA, 19 nt, Artificial Sequence
  Description of Artificial Sequence: Synthetic oligonucleotide
acccucacaggcccccaca

SEQ ID NO: 5809 - RNA, 19 nt, Artificial Sequence
  Description of Artificial Sequence: Synthetic oligonucleotide
cacccucacaggcccccac

SEQ ID NO: 5810 - RNA, 19 nt, Artificial Sequence
  Description of Artificial Sequence: Synthetic oligonucleotide
ucacccucacaggccccca

SEQ ID NO: 5811 - RNA, 19 nt, Artificial Sequence
  Description of Artificial Sequence: Synthetic oligonucleotide
gucacccucacaggccccc

SEQ ID NO: 5812 - RNA, 19 nt, Artificial Sequence
  Description of Artificial Sequence: Synthetic oligonucleotide
agucacccucacaggcccc

SEQ ID NO: 5813 - RNA, 19 nt, Artificial Sequence
  Description of Artificial Sequence: Synthetic oligonucleotide
uagucacccucacaggccc

SEQ ID NO: 5814 - RNA, 19 nt, Artificial Sequence
  Description of Artificial Sequence: Synthetic oligonucleotide
guagucacccucacaggcc

SEQ ID NO: 5815 - RNA, 19 nt, Artificial Sequence
  Description of Artificial Sequence: Synthetic oligonucleotide
cguagucacccucacaggc

SEQ ID NO: 5816 - RNA, 19 nt, Artificial Sequence
  Description of Artificial Sequence: Synthetic oligonucleotide
ccguagucacccucacagg

SEQ ID NO: 5817 - RNA, 19 nt, Artificial Sequence
  Description of Artificial Sequence: Synthetic oligonucleotide
cccguagucacccucacag

SEQ ID NO: 5818 - RNA, 19 nt, Artificial Sequence
  Description of Artificial Sequence: Synthetic oligonucleotide
ccccguagucacccucaca

SEQ ID NO: 5819 - RNA, 19 nt, Artificial Sequence
  Description of Artificial Sequence: Synthetic oligonucleotide
cccccguagucacccucac

SEQ ID NO: 5820 - RNA, 19 nt, Artificial Sequence
  Description of Artificial Sequence: Synthetic oligonucleotide
gcccccguagucacccuca

SEQ ID NO: 5821 - RNA, 19 nt, Artificial Sequence
  Description of Artificial Sequence: Synthetic oligonucleotide
ggcccccguagucacccuc

SEQ ID NO: 5822 - RNA, 19 nt, Artificial Sequence
  Description of Artificial Sequence: Synthetic oligonucleotide
gggcccccguagucacccu

SEQ ID NO: 5823 - RNA, 19 nt, Artificial Sequence
  Description of Artificial Sequence: Synthetic oligonucleotide
ugggcccccguagucaccc

SEQ ID NO: 5824 - RNA, 19 nt, Artificial Sequence
  Description of Artificial Sequence: Synthetic oligonucleotide
gugggcccccguagucacc

SEQ ID NO: 5825 - RNA, 19 nt, Artificial Sequence
  Description of Artificial Sequence: Synthetic oligonucleotide
agugggcccccguagucac

SEQ ID NO: 5826 - RNA, 19 nt, Artificial Sequence
  Description of Artificial Sequence: Synthetic oligonucleotide
aagugggcccccguaguca

SEQ ID NO: 5827 - RNA, 19 nt, Artificial Sequence
  Description of Artificial Sequence: Synthetic oligonucleotide
caagugggcccccguaguc

SEQ ID NO: 5828 - RNA, 19 nt, Artificial Sequence
  Description of Artificial Sequence: Synthetic oligonucleotide
gcaagugggcccccguagu

SEQ ID NO: 5829 - RNA, 19 nt, Artificial Sequence
  Description of Artificial Sequence: Synthetic oligonucleotide
ggcaagugggcccccguag

SEQ ID NO: 5830 - RNA, 19 nt, Artificial Sequence
  Description of Artificial Sequence: Synthetic oligonucleotide
aggcaagugggcccccgua

SEQ ID NO: 5831 - RNA, 19 nt, Artificial Sequence
  Description of Artificial Sequence: Synthetic oligonucleotide
caggcaagugggcccccgu

SEQ ID NO: 5832 - RNA, 19 nt, Artificial Sequence
  Description of Artificial Sequence: Synthetic oligonucleotide
gcaggcaagugggcccccg

SEQ ID NO: 5833 - RNA, 19 nt, Artificial Sequence
  Description of Artificial Sequence: Synthetic oligonucleotide
agcaggcaagugggccccc

SEQ ID NO: 5834 - RNA, 19 nt, Artificial Sequence
  Description of Artificial Sequence: Synthetic oligonucleotide
aagcaggcaagugggcccc

SEQ ID NO: 5835 - RNA, 19 nt, Artificial Sequence
  Description of Artificial Sequence: Synthetic oligonucleotide
aaagcaggcaagugggccc

SEQ ID NO: 5836 - RNA, 19 nt, Artificial Sequence
  Description of Artificial Sequence: Synthetic oligonucleotide
uaaagcaggcaagugggcc

SEQ ID NO: 5837 - RNA, 19 nt, Artificial Sequence
  Description of Artificial Sequence: Synthetic oligonucleotide
guaaagcaggcaagugggc

SEQ ID NO: 5838 - RNA, 19 nt, Artificial Sequence
  Description of Artificial Sequence: Synthetic oligonucleotide
gguaaagcaggcaaguggg

SEQ ID NO: 5839 - RNA, 19 nt, Artificial Sequence
  Description of Artificial Sequence: Synthetic oligonucleotide
ggguaaagcaggcaagugg

SEQ ID NO: 5840 - RNA, 19 nt, Artificial Sequence
  Description of Artificial Sequence: Synthetic oligonucleotide
uggguaaagcaggcaagug

SEQ ID NO: 5841 - RNA, 19 nt, Artificial Sequence
  Description of Artificial Sequence: Synthetic oligonucleotide
guggguaaagcaggcaagu

SEQ ID NO: 5842 - RNA, 19 nt, Artificial Sequence
  Description of Artificial Sequence: Synthetic oligonucleotide
uguggguaaagcaggcaag

SEQ ID NO: 5843 - RNA, 19 nt, Artificial Sequence
  Description of Artificial Sequence: Synthetic oligonucleotide
uuguggguaaagcaggcaa

SEQ ID NO: 5844 - RNA, 19 nt, Artificial Sequence
  Description of Artificial Sequence: Synthetic oligonucleotide
guuguggguaaagcaggca

SEQ ID NO: 5845 - RNA, 19 nt, Artificial Sequence
  Description of Artificial Sequence: Synthetic oligonucleotide
aguuguggguaaagcaggc

SEQ ID NO: 5846 - RNA, 19 nt, Artificial Sequence
  Description of Artificial Sequence: Synthetic oligonucleotide
caguuguggguaaagcagg

SEQ ID NO: 5847 - RNA, 19 nt, Artificial Sequence
  Description of Artificial Sequence: Synthetic oligonucleotide
gcaguuguggguaaagcag

SEQ ID NO: 5848 - RNA, 19 nt, Artificial Sequence
  Description of Artificial Sequence: Synthetic oligonucleotide
agcaguuguggguaaagca

SEQ ID NO: 5849 - RNA, 19 nt, Artificial Sequence
  Description of Artificial Sequence: Synthetic oligonucleotide
cagcaguuguggguaaagc

SEQ ID NO: 5850 - RNA, 19 nt, Artificial Sequence
  Description of Artificial Sequence: Synthetic oligonucleotide
ccagcaguuguggguaaag

SEQ ID NO: 5851 - RNA, 19 nt, Artificial Sequence
  Description of Artificial Sequence: Synthetic oligonucleotide
cccagcaguuguggguaaa

SEQ ID NO: 5852 - RNA, 19 nt, Artificial Sequence
  Description of Artificial Sequence: Synthetic oligonucleotide
acccagcaguuguggguaa

SEQ ID NO: 5853 - RNA, 19 nt, Artificial Sequence
  Description of Artificial Sequence: Synthetic oligonucleotide
gacccagcaguugugggua

SEQ ID NO: 5854 - RNA, 19 nt, Artificial Sequence
  Description of Artificial Sequence: Synthetic oligonucleotide
ggacccagcaguugugggu

SEQ ID NO: 5855 - RNA, 19 nt, Artificial Sequence
  Description of Artificial Sequence: Synthetic oligonucleotide
aggacccagcaguuguggg

SEQ ID NO: 5856 - RNA, 19 nt, Artificial Sequence
  Description of Artificial Sequence: Synthetic oligonucleotide
caggacccagcaguugugg

SEQ ID NO: 5857 - RNA, 19 nt, Artificial Sequence
  Description of Artificial Sequence: Synthetic oligonucleotide
ccaggacccagcaguugug

SEQ ID NO: 5858 - RNA, 19 nt, Artificial Sequence
  Description of Artificial Sequence: Synthetic oligonucleotide
uccaggacccagcaguugu

SEQ ID NO: 5859 - RNA, 19 nt, Artificial Sequence
  Description of Artificial Sequence: Synthetic oligonucleotide
uuccaggacccagcaguug

SEQ ID NO: 5860 - RNA, 19 nt, Artificial Sequence
  Description of Artificial Sequence: Synthetic oligonucleotide
cuuccaggacccagcaguu

SEQ ID NO: 5861 - RNA, 19 nt, Artificial Sequence
  Description of Artificial Sequence: Synthetic oligonucleotide
ccuuccaggacccagcagu

SEQ ID NO: 5862 - RNA, 19 nt, Artificial Sequence
  Description of Artificial Sequence: Synthetic oligonucleotide
uccuuccaggacccagcag

SEQ ID NO: 5863 - RNA, 19 nt, Artificial Sequence
  Description of Artificial Sequence: Synthetic oligonucleotide
uuccuuccaggacccagca

SEQ ID NO: 5864 - RNA, 19 nt, Artificial Sequence
  Description of Artificial Sequence: Synthetic oligonucleotide
auuccuuccaggacccagc

SEQ ID NO: 5865 - RNA, 19 nt, Artificial Sequence
  Description of Artificial Sequence: Synthetic oligonucleotide
aauuccuuccaggacccag

SEQ ID NO: 5866 - RNA, 19 nt, Artificial Sequence
  Description of Artificial Sequence: Synthetic oligonucleotide
uaauuccuuccaggaccca

SEQ ID NO: 5867 - RNA, 19 nt, Artificial Sequence
  Description of Artificial Sequence: Synthetic oligonucleotide
auaauuccuuccaggaccc

SEQ ID NO: 5868 - RNA, 19 nt, Artificial Sequence
  Description of Artificial Sequence: Synthetic oligonucleotide
uauaauuccuuccaggacc

SEQ ID NO: 5869 - RNA, 19 nt, Artificial Sequence
  Description of Artificial Sequence: Synthetic oligonucleotide
uuauaauuccuuccaggac

SEQ ID NO: 5870 - RNA, 19 nt, Artificial Sequence
  Description of Artificial Sequence: Synthetic oligonucleotide
auuauaauuccuuccagga

SEQ ID NO: 5871 - RNA, 19 nt, Artificial Sequence
  Description of Artificial Sequence: Synthetic oligonucleotide
gauuauaauuccuuccagg

SEQ ID NO: 5872 - RNA, 19 nt, Artificial Sequence
  Description of Artificial Sequence: Synthetic oligonucleotide
ggauuauaauuccuuccag

SEQ ID NO: 5873 - RNA, 19 nt, Artificial Sequence
  Description of Artificial Sequence: Synthetic oligonucleotide
gggauuauaauuccuucca

SEQ ID NO: 5874 - RNA, 19 nt, Artificial Sequence
  Description of Artificial Sequence: Synthetic oligonucleotide
ggggauuauaauuccuucc

SEQ ID NO: 5875 - RNA, 19 nt, Artificial Sequence
  Description of Artificial Sequence: Synthetic oligonucleotide
uggggauuauaauuccuuc

SEQ ID NO: 5876 - RNA, 19 nt, Artificial Sequence
  Description of Artificial Sequence: Synthetic oligonucleotide
uuggggauuauaauuccuu

SEQ ID NO: 5877 - RNA, 19 nt, Artificial Sequence
  Description of Artificial Sequence: Synthetic oligonucleotide
guuggggauuauaauuccu

SEQ ID NO: 5878 - RNA, 19 nt, Artificial Sequence
  Description of Artificial Sequence: Synthetic oligonucleotide
gguuggggauuauaauucc

SEQ ID NO: 5879 - RNA, 19 nt, Artificial Sequence
  Description of Artificial Sequence: Synthetic oligonucleotide
cgguuggggauuauaauuc

SEQ ID NO: 5880 - RNA, 19 nt, Artificial Sequence
  Description of Artificial Sequence: Synthetic oligonucleotide
ucgguuggggauuauaauu

SEQ ID NO: 5881 - RNA, 19 nt, Artificial Sequence
  Description of Artificial Sequence: Synthetic oligonucleotide
cucgguuggggauuauaau

SEQ ID NO: 5882 - RNA, 19 nt, Artificial Sequence
  Description of Artificial Sequence: Synthetic oligonucleotide
acucgguuggggauuauaa

SEQ ID NO: 5883 - RNA, 19 nt, Artificial Sequence
  Description of Artificial Sequence: Synthetic oligonucleotide
uacucgguuggggauuaua

SEQ ID NO: 5884 - RNA, 19 nt, Artificial Sequence
  Description of Artificial Sequence: Synthetic oligonucleotide
auacucgguuggggauuau

SEQ ID NO: 5885 - RNA, 19 nt, Artificial Sequence
  Description of Artificial Sequence: Synthetic oligonucleotide
cauacucgguuggggauua

SEQ ID NO: 5886 - RNA, 19 nt, Artificial Sequence
  Description of Artificial Sequence: Synthetic oligonucleotide
gcauacucgguuggggauu

SEQ ID NO: 5887 - RNA, 19 nt, Artificial Sequence
  Description of Artificial Sequence: Synthetic oligonucleotide
cgcauacucgguuggggau

SEQ ID NO: 5888 - RNA, 19 nt, Artificial Sequence
  Description of Artificial Sequence: Synthetic oligonucleotide
gcgcauacucgguugggga

SEQ ID NO: 5889 - RNA, 19 nt, Artificial Sequence
  Description of Artificial Sequence: Synthetic oligonucleotide
ugcgcauacucgguugggg

SEQ ID NO: 5890 - RNA, 19 nt, Artificial Sequence
  Description of Artificial Sequence: Synthetic oligonucleotide
uugcgcauacucgguuggg

SEQ ID NO: 5891 - RNA, 19 nt, Artificial Sequence
  Description of Artificial Sequence: Synthetic oligonucleotide
cuugcgcauacucgguugg

SEQ ID NO: 5892 - RNA, 19 nt, Artificial Sequence
  Description of Artificial Sequence: Synthetic oligonucleotide
ccuugcgcauacucgguug

SEQ ID NO: 5893 - RNA, 19 nt, Artificial Sequence
  Description of Artificial Sequence: Synthetic oligonucleotide
accuugcgcauacucgguu

SEQ ID NO: 5894 - RNA, 19 nt, Artificial Sequence
  Description of Artificial Sequence: Synthetic oligonucleotide
gaccuugcgcauacucggu

SEQ ID NO: 5895 - RNA, 19 nt, Artificial Sequence
  Description of Artificial Sequence: Synthetic oligonucleotide
ggaccuugcgcauacucgg

SEQ ID NO: 5896 - RNA, 19 nt, Artificial Sequence
  Description of Artificial Sequence: Synthetic oligonucleotide
gggaccuugcgcauacucg

SEQ ID NO: 5897 - RNA, 19 nt, Artificial Sequence
  Description of Artificial Sequence: Synthetic oligonucleotide
cgggaccuugcgcauacuc

SEQ ID NO: 5898 - RNA, 19 nt, Artificial Sequence
  Description of Artificial Sequence: Synthetic oligonucleotide
gcgggaccuugcgcauacu

SEQ ID NO: 5899 - RNA, 19 nt, Artificial Sequence
  Description of Artificial Sequence: Synthetic oligonucleotide
agcgggaccuugcgcauac

SEQ ID NO: 5900 - RNA, 19 nt, Artificial Sequence
  Description of Artificial Sequence: Synthetic oligonucleotide
cagcgggaccuugcgcaua

SEQ ID NO: 5901 - RNA, 19 nt, Artificial Sequence
  Description of Artificial Sequence: Synthetic oligonucleotide
ccagcgggaccuugcgcau

SEQ ID NO: 5902 - RNA, 19 nt, Artificial Sequence
  Description of Artificial Sequence: Synthetic oligonucleotide
gccagcgggaccuugcgca

SEQ ID NO: 5903 - RNA, 19 nt, Artificial Sequence
  Description of Artificial Sequence: Synthetic oligonucleotide
ggccagcgggaccuugcgc

SEQ ID NO: 5904 - RNA, 19 nt, Artificial Sequence
  Description of Artificial Sequence: Synthetic oligonucleotide
uggccagcgggaccuugcg

SEQ ID NO: 5905 - RNA, 19 nt, Artificial Sequence
  Description of Artificial Sequence: Synthetic oligonucleotide
cuggccagcgggaccuugc

SEQ ID NO: 5906 - RNA, 19 nt, Artificial Sequence
  Description of Artificial Sequence: Synthetic oligonucleotide
gcuggccagcgggaccuug

SEQ ID NO: 5907 - RNA, 19 nt, Artificial Sequence
  Description of Artificial Sequence: Synthetic oligonucleotide
agcuggccagcgggaccuu

SEQ ID NO: 5908 - RNA, 19 nt, Artificial Sequence
  Description of Artificial Sequence: Synthetic oligonucleotide
cagcuggccagcgggaccu

SEQ ID NO: 5909 - RNA, 19 nt, Artificial Sequence
  Description of Artificial Sequence: Synthetic oligonucleotide
acagcuggccagcgggacc

SEQ ID NO: 5910 - RNA, 19 nt, Artificial Sequence
  Description of Artificial Sequence: Synthetic oligonucleotide
gacagcuggccagcgggac

SEQ ID NO: 5911 - RNA, 19 nt, Artificial Sequence
  Description of Artificial Sequence: Synthetic oligonucleotide
agacagcuggccagcggga

SEQ ID NO: 5912 - RNA, 19 nt, Artificial Sequence
  Description of Artificial Sequence: Synthetic oligonucleotide
aagacagcuggccagcggg

SEQ ID NO: 5913 - RNA, 19 nt, Artificial Sequence
  Description of Artificial Sequence: Synthetic oligonucleotide
gaagacagcuggccagcgg

SEQ ID NO: 5914 - RNA, 19 nt, Artificial Sequence
  Description of Artificial Sequence: Synthetic oligonucleotide
ugaagacagcuggccagcg

SEQ ID NO: 5915 - RNA, 19 nt, Artificial Sequence
  Description of Artificial Sequence: Synthetic oligonucleotide
gugaagacagcuggccagc

SEQ ID NO: 5916 - RNA, 19 nt, Artificial Sequence
  Description of Artificial Sequence: Synthetic oligonucleotide
cgugaagacagcuggccag

SEQ ID NO: 5917 - RNA, 19 nt, Artificial Sequence
  Description of Artificial Sequence: Synthetic oligonucleotide
gcgugaagacagcuggcca

SEQ ID NO: 5918 - RNA, 19 nt, Artificial Sequence
  Description of Artificial Sequence: Synthetic oligonucleotide
cgcgugaagacagcuggcc

SEQ ID NO: 5919 - RNA, 19 nt, Artificial Sequence
  Description of Artificial Sequence: Synthetic oligonucleotide
acgcgugaagacagcuggc

SEQ ID NO: 5920 - RNA, 19 nt, Artificial Sequence
  Description of Artificial Sequence: Synthetic oligonucleotide
cacgcgugaagacagcugg

SEQ ID NO: 5921 - RNA, 19 nt, Artificial Sequence
  Description of Artificial Sequence: Synthetic oligonucleotide
acacgcgugaagacagcug

SEQ ID NO: 5922 - RNA, 19 nt, Artificial Sequence
  Description of Artificial Sequence: Synthetic oligonucleotide
gacacgcgugaagacagcu

SEQ ID NO: 5923 - RNA, 19 nt, Artificial Sequence
  Description of Artificial Sequence: Synthetic oligonucleotide
agacacgcgugaagacagc

SEQ ID NO: 5924 - RNA, 19 nt, Artificial Sequence
  Description of Artificial Sequence: Synthetic oligonucleotide
gagacacgcgugaagacag

SEQ ID NO: 5925 - RNA, 19 nt, Artificial Sequence
  Description of Artificial Sequence: Synthetic oligonucleotide
agagacacgcgugaagaca

SEQ ID NO: 5926 - RNA, 19 nt, Artificial Sequence
  Description of Artificial Sequence: Synthetic oligonucleotide
cagagacacgcgugaagac

SEQ ID NO: 5927 - RNA, 19 nt, Artificial Sequence
  Description of Artificial Sequence: Synthetic oligonucleotide
acagagacacgcgugaaga

SEQ ID NO: 5928 - RNA, 19 nt, Artificial Sequence
  Description of Artificial Sequence: Synthetic oligonucleotide
cacagagacacgcgugaag

SEQ ID NO: 5929 - RNA, 19 nt, Artificial Sequence
  Description of Artificial Sequence: Synthetic oligonucleotide
acacagagacacgcgugaa

SEQ ID NO: 5930 - RNA, 19 nt, Artificial Sequence
  Description of Artificial Sequence: Synthetic oligonucleotide
aacacagagacacgcguga

SEQ ID NO: 5931 - RNA, 19 nt, Artificial Sequence
  Description of Artificial Sequence: Synthetic oligonucleotide
aaacacagagacacgcgug

SEQ ID NO: 5932 - RNA, 19 nt, Artificial Sequence
  Description of Artificial Sequence: Synthetic oligonucleotide
caaacacagagacacgcgu

SEQ ID NO: 5933 - RNA, 19 nt, Artificial Sequence
  Description of Artificial Sequence: Synthetic oligonucleotide
acaaacacagagacacgcg

SEQ ID NO: 5934 - RNA, 19 nt, Artificial Sequence
  Description of Artificial Sequence: Synthetic oligonucleotide
cacaaacacagagacacgc

SEQ ID NO: 5935 - RNA, 19 nt, Artificial Sequence
  Description of Artificial Sequence: Synthetic oligonucleotide
ccacaaacacagagacacg

SEQ ID NO: 5936 - RNA, 19 nt, Artificial Sequence
  Description of Artificial Sequence: Synthetic oligonucleotide
uccacaaacacagagacac

SEQ ID NO: 5937 - RNA, 19 nt, Artificial Sequence
  Description of Artificial Sequence: Synthetic oligonucleotide
guccacaaacacagagaca

SEQ ID NO: 5938 - RNA, 19 nt, Artificial Sequence
  Description of Artificial Sequence: Synthetic oligonucleotide
aguccacaaacacagagac

SEQ ID NO: 5939 - RNA, 19 nt, Artificial Sequence
  Description of Artificial Sequence: Synthetic oligonucleotide
caguccacaaacacagaga

SEQ ID NO: 5940 - RNA, 19 nt, Artificial Sequence
  Description of Artificial Sequence: Synthetic oligonucleotide
ccaguccacaaacacagag

SEQ ID NO: 5941 - RNA, 19 nt, Artificial Sequence
  Description of Artificial Sequence: Synthetic oligonucleotide
uccaguccacaaacacaga

SEQ ID NO: 5942 - RNA, 19 nt, Artificial Sequence
  Description of Artificial Sequence: Synthetic oligonucleotide
auccaguccacaaacacag

SEQ ID NO: 5943 - RNA, 19 nt, Artificial Sequence
  Description of Artificial Sequence: Synthetic oligonucleotide
aauccaguccacaaacaca

SEQ ID NO: 5944 - RNA, 19 nt, Artificial Sequence
  Description of Artificial Sequence: Synthetic oligonucleotide
gaauccaguccacaaacac

SEQ ID NO: 5945 - RNA, 19 nt, Artificial Sequence
  Description of Artificial Sequence: Synthetic oligonucleotide
ugaauccaguccacaaaca

SEQ ID NO: 5946 - RNA, 19 nt, Artificial Sequence
  Description of Artificial Sequence: Synthetic oligonucleotide
gugaauccaguccacaaac

SEQ ID NO: 5947 - RNA, 19 nt, Artificial Sequence
  Description of Artificial Sequence: Synthetic oligonucleotide
ugugaauccaguccacaaa

SEQ ID NO: 5948 - RNA, 19 nt, Artificial Sequence
  Description of Artificial Sequence: Synthetic oligonucleotide
uugugaauccaguccacaa

SEQ ID NO: 5949 - RNA, 19 nt, Artificial Sequence
  Description of Artificial Sequence: Synthetic oligonucleotide
cuugugaauccaguccaca

SEQ ID NO: 5950 - RNA, 19 nt, Artificial Sequence
  Description of Artificial Sequence: Synthetic oligonucleotide
ccuugugaauccaguccac

SEQ ID NO: 5951 - RNA, 19 nt, Artificial Sequence
  Description of Artificial Sequence: Synthetic oligonucleotide
accuugugaauccagucca

SEQ ID NO: 5952 - RNA, 19 nt, Artificial Sequence
  Description of Artificial Sequence: Synthetic oligonucleotide
gaccuugugaauccagucc

SEQ ID NO: 5953 - RNA, 19 nt, Artificial Sequence
  Description of Artificial Sequence: Synthetic oligonucleotide
ugaccuugugaauccaguc

SEQ ID NO: 5954 - RNA, 19 nt, Artificial Sequence
  Description of Artificial Sequence: Synthetic oligonucleotide
augaccuugugaauccagu

SEQ ID NO: 5955 - RNA, 19 nt, Artificial Sequence
  Description of Artificial Sequence: Synthetic oligonucleotide
caugaccuugugaauccag

SEQ ID NO: 5956 - RNA, 19 nt, Artificial Sequence
  Description of Artificial Sequence: Synthetic oligonucleotide
ucaugaccuugugaaucca

SEQ ID NO: 5957 - RNA, 19 nt, Artificial Sequence
  Description of Artificial Sequence: Synthetic oligonucleotide
cucaugaccuugugaaucc

SEQ ID NO: 5958 - RNA, 19 nt, Artificial Sequence
  Description of Artificial Sequence: Synthetic oligonucleotide
ucucaugaccuugugaauc

SEQ ID NO: 5959 - RNA, 19 nt, Artificial Sequence
  Description of Artificial Sequence: Synthetic oligonucleotide
gucucaugaccuugugaau

SEQ ID NO: 5960 - RNA, 19 nt, Artificial Sequence
  Description of Artificial Sequence: Synthetic oligonucleotide
agucucaugaccuugugaa

SEQ ID NO: 5961 - RNA, 19 nt, Artificial Sequence
  Description of Artificial Sequence: Synthetic oligonucleotide
cagucucaugaccuuguga

SEQ ID NO: 5962 - RNA, 19 nt, Artificial Sequence
  Description of Artificial Sequence: Synthetic oligonucleotide
ccagucucaugaccuugug

SEQ ID NO: 5963 - RNA, 19 nt, Artificial Sequence
  Description of Artificial Sequence: Synthetic oligonucleotide
cccagucucaugaccuugu

SEQ ID NO: 5964 - RNA, 19 nt, Artificial Sequence
  Description of Artificial Sequence: Synthetic oligonucleotide
acccagucucaugaccuug

SEQ ID NO: 5965 - RNA, 19 nt, Artificial Sequence
  Description of Artificial Sequence: Synthetic oligonucleotide
aacccagucucaugaccuu

SEQ ID NO: 5966 - RNA, 19 nt, Artificial Sequence
  Description of Artificial Sequence: Synthetic oligonucleotide
uaacccagucucaugaccu

SEQ ID NO: 5967 - RNA, 19 nt, Artificial Sequence
  Description of Artificial Sequence: Synthetic oligonucleotide
cuaacccagucucaugacc

SEQ ID NO: 5968 - RNA, 19 nt, Artificial Sequence
  Description of Artificial Sequence: Synthetic oligonucleotide
ccuaacccagucucaugac

SEQ ID NO: 5969 - RNA, 19 nt, Artificial Sequence
  Description of Artificial Sequence: Synthetic oligonucleotide
gccuaacccagucucauga

SEQ ID NO: 5970 - RNA, 19 nt, Artificial Sequence
  Description of Artificial Sequence: Synthetic oligonucleotide
ggccuaacccagucucaug

SEQ ID NO: 5971 - RNA, 19 nt, Artificial Sequence
  Description of Artificial Sequence: Synthetic oligonucleotide
gggccuaacccagucucau

SEQ ID NO: 5972 - RNA, 19 nt, Artificial Sequence
  Description of Artificial Sequence: Synthetic oligonucleotide
ugggccuaacccagucuca

SEQ ID NO: 5973 - RNA, 19 nt, Artificial Sequence
  Description of Artificial Sequence: Synthetic oligonucleotide
cugggccuaacccagucuc

SEQ ID NO: 5974 - RNA, 19 nt, Artificial Sequence
  Description of Artificial Sequence: Synthetic oligonucleotide
gcugggccuaacccagucu

SEQ ID NO: 5975 - RNA, 19 nt, Artificial Sequence
  Description of Artificial Sequence: Synthetic oligonucleotide
ggcugggccuaacccaguc

SEQ ID NO: 5976 - RNA, 19 nt, Artificial Sequence
  Description of Artificial Sequence: Synthetic oligonucleotide
aggcugggccuaacccagu

SEQ ID NO: 5977 - RNA, 19 nt, Artificial Sequence
  Description of Artificial Sequence: Synthetic oligonucleotide
aaggcugggccuaacccag

SEQ ID NO: 5978 - RNA, 19 nt, Artificial Sequence
  Description of Artificial Sequence: Synthetic oligonucleotide
caaggcugggccuaaccca

SEQ ID NO: 5979 - RNA, 19 nt, Artificial Sequence
  Description of Artificial Sequence: Synthetic oligonucleotide
ucaaggcugggccuaaccc

SEQ ID NO: 5980 - RNA, 19 nt, Artificial Sequence
  Description of Artificial Sequence: Synthetic oligonucleotide
aucaaggcugggccuaacc

SEQ ID NO: 5981 - RNA, 19 nt, Artificial Sequence
  Description of Artificial Sequence: Synthetic oligonucleotide
caucaaggcugggccuaac

SEQ ID NO: 5982 - RNA, 19 nt, Artificial Sequence
  Description of Artificial Sequence: Synthetic oligonucleotide
gcaucaaggcugggccuaa

SEQ ID NO: 5983 - RNA, 19 nt, Artificial Sequence
  Description of Artificial Sequence: Synthetic oligonucleotide
ggcaucaaggcugggccua

SEQ ID NO: 5984 - RNA, 19 nt, Artificial Sequence
  Description of Artificial Sequence: Synthetic oligonucleotide
uggcaucaaggcugggccu

SEQ ID NO: 5985 - RNA, 19 nt, Artificial Sequence
  Description of Artificial Sequence: Synthetic oligonucleotide
auggcaucaaggcugggcc

SEQ ID NO: 5986 - RNA, 19 nt, Artificial Sequence
  Description of Artificial Sequence: Synthetic oligonucleotide
uauggcaucaaggcugggc

SEQ ID NO: 5987 - RNA, 19 nt, Artificial Sequence
  Description of Artificial Sequence: Synthetic oligonucleotide
auauggcaucaaggcuggg

SEQ ID NO: 5988 - RNA, 19 nt, Artificial Sequence
  Description of Artificial Sequence: Synthetic oligonucleotide
cauauggcaucaaggcugg

SEQ ID NO: 5989 - RNA, 19 nt, Artificial Sequence
  Description of Artificial Sequence: Synthetic oligonucleotide
gcauauggcaucaaggcug

SEQ ID NO: 5990 - RNA, 19 nt, Artificial Sequence
  Description of Artificial Sequence: Synthetic oligonucleotide
ggcauauggcaucaaggcu

SEQ ID NO: 5991 - RNA, 19 nt, Artificial Sequence
  Description of Artificial Sequence: Synthetic oligonucleotide
aggcauauggcaucaaggc

SEQ ID NO: 5992 - RNA, 19 nt, Artificial Sequence
  Description of Artificial Sequence: Synthetic oligonucleotide
aaggcauauggcaucaagg

SEQ ID NO: 5993 - RNA, 19 nt, Artificial Sequence
  Description of Artificial Sequence: Synthetic oligonucleotide
caaggcauauggcaucaag

SEQ ID NO: 5994 - RNA, 19 nt, Artificial Sequence
  Description of Artificial Sequence: Synthetic oligonucleotide
ccaaggcauauggcaucaa

SEQ ID NO: 5995 - RNA, 19 nt, Artificial Sequence
  Description of Artificial Sequence: Synthetic oligonucleotide
cccaaggcauauggcauca

SEQ ID NO: 5996 - RNA, 19 nt, Artificial Sequence
  Description of Artificial Sequence: Synthetic oligonucleotide
ccccaaggcauauggcauc

SEQ ID NO: 5997 - RNA, 19 nt, Artificial Sequence
  Description of Artificial Sequence: Synthetic oligonucleotide
uccccaaggcauauggcau

SEQ ID NO: 5998 - RNA, 19 nt, Artificial Sequence
  Description of Artificial Sequence: Synthetic oligonucleotide
cuccccaaggcauauggca

SEQ ID NO: 5999 - RNA, 19 nt, Artificial Sequence
  Description of Artificial Sequence: Synthetic oligonucleotide
ccuccccaaggcauauggc

SEQ ID NO: 6000 - RNA, 19 nt, Artificial Sequence
  Description of Artificial Sequence: Synthetic oligonucleotide
uccuccccaaggcauaugg

SEQ ID NO: 6001 - RNA, 19 nt, Artificial Sequence
  Description of Artificial Sequence: Synthetic oligonucleotide
guccuccccaaggcauaug

SEQ ID NO: 6002 - RNA, 19 nt, Artificial Sequence
  Description of Artificial Sequence: Synthetic oligonucleotide
uguccuccccaaggcauau

SEQ ID NO: 6003 - RNA, 19 nt, Artificial Sequence
  Description of Artificial Sequence: Synthetic oligonucleotide
uuguccuccccaaggcaua

SEQ ID NO: 6004 - RNA, 19 nt, Artificial Sequence
  Description of Artificial Sequence: Synthetic oligonucleotide
uuuguccuccccaaggcau

SEQ ID NO: 6005 - RNA, 19 nt, Artificial Sequence
  Description of Artificial Sequence: Synthetic oligonucleotide
uuuuguccuccccaaggca

SEQ ID NO: 6006 - RNA, 19 nt, Artificial Sequence
  Description of Artificial Sequence: Synthetic oligonucleotide
guuuuguccuccccaaggc

SEQ ID NO: 6007 - RNA, 19 nt, Artificial Sequence
  Description of Artificial Sequence: Synthetic oligonucleotide
aguuuuguccuccccaagg

SEQ ID NO: 6008 - RNA, 19 nt, Artificial Sequence
  Description of Artificial Sequence: Synthetic oligonucleotide
aaguuuuguccuccccaag

SEQ ID NO: 6009 - RNA, 19 nt, Artificial Sequence
  Description of Artificial Sequence: Synthetic oligonucleotide
gaaguuuuguccuccccaa

SEQ ID NO: 6010 - RNA, 19 nt, Artificial Sequence
  Description of Artificial Sequence: Synthetic oligonucleotide
agaaguuuuguccucccca

SEQ ID NO: 6011 - RNA, 19 nt, Artificial Sequence
  Description of Artificial Sequence: Synthetic oligonucleotide
aagaaguuuuguccucccc

SEQ ID NO: 6012 - RNA, 19 nt, Artificial Sequence
  Description of Artificial Sequence: Synthetic oligonucleotide
caagaaguuuuguccuccc

SEQ ID NO: 6013 - RNA, 19 nt, Artificial Sequence
  Description of Artificial Sequence: Synthetic oligonucleotide
acaagaaguuuuguccucc

SEQ ID NO: 6014 - RNA, 19 nt, Artificial Sequence
  Description of Artificial Sequence: Synthetic oligonucleotide
gacaagaaguuuuguccuc

SEQ ID NO: 6015 - RNA, 19 nt, Artificial Sequence
  Description of Artificial Sequence: Synthetic oligonucleotide
ugacaagaaguuuuguccu

SEQ ID NO: 6016 - RNA, 19 nt, Artificial Sequence
  Description of Artificial Sequence: Synthetic oligonucleotide
cugacaagaaguuuugucc

SEQ ID NO: 6017 - RNA, 19 nt, Artificial Sequence
  Description of Artificial Sequence: Synthetic oligonucleotide
ucugacaagaaguuuuguc

SEQ ID NO: 6018 - RNA, 19 nt, Artificial Sequence
  Description of Artificial Sequence: Synthetic oligonucleotide
gucugacaagaaguuuugu

SEQ ID NO: 6019 - RNA, 19 nt, Artificial Sequence
  Description of Artificial Sequence: Synthetic oligonucleotide
ugucugacaagaaguuuug

SEQ ID NO: 6020 - RNA, 19 nt, Artificial Sequence
  Description of Artificial Sequence: Synthetic oligonucleotide
augucugacaagaaguuuu

SEQ ID NO: 6021 - RNA, 19 nt, Artificial Sequence
  Description of Artificial Sequence: Synthetic oligonucleotide
uaugucugacaagaaguuu

SEQ ID NO: 6022 - RNA, 19 nt, Artificial Sequence
  Description of Artificial Sequence: Synthetic oligonucleotide
uuaugucugacaagaaguu

SEQ ID NO: 6023 - RNA, 19 nt, Artificial Sequence
  Description of Artificial Sequence: Synthetic oligonucleotide
uuuaugucugacaagaagu

SEQ ID NO: 6024 - RNA, 19 nt, Artificial Sequence
  Description of Artificial Sequence: Synthetic oligonucleotide
cuuuaugucugacaagaag

SEQ ID NO: 6025 - RNA, 19 nt, Artificial Sequence
  Description of Artificial Sequence: Synthetic oligonucleotide
gcuuuaugucugacaagaa

SEQ ID NO: 6026 - RNA, 19 nt, Artificial Sequence
  Description of Artificial Sequence: Synthetic oligonucleotide
ggcuuuaugucugacaaga

SEQ ID NO: 6027 - RNA, 19 nt, Artificial Sequence
  Description of Artificial Sequence: Synthetic oligonucleotide
uggcuuuaugucugacaag

SEQ ID NO: 6028 - RNA, 19 nt, Artificial Sequence
  Description of Artificial Sequence: Synthetic oligonucleotide
auggcuuuaugucugacaa

SEQ ID NO: 6029 - RNA, 19 nt, Artificial Sequence
  Description of Artificial Sequence: Synthetic oligonucleotide
cauggcuuuaugucugaca

SEQ ID NO: 6030 - RNA, 19 nt, Artificial Sequence
  Description of Artificial Sequence: Synthetic oligonucleotide
acauggcuuuaugucugac

SEQ ID NO: 6031 - RNA, 19 nt, Artificial Sequence
  Description of Artificial Sequence: Synthetic oligonucleotide
aacauggcuuuaugucuga

SEQ ID NO: 6032 - RNA, 19 nt, Artificial Sequence
  Description of Artificial Sequence: Synthetic oligonucleotide
aaacauggcuuuaugucug

SEQ ID NO: 6033 - RNA, 19 nt, Artificial Sequence
  Description of Artificial Sequence: Synthetic oligonucleotide
gaaacauggcuuuaugucu

SEQ ID NO: 6034 - RNA, 19 nt, Artificial Sequence
  Description of Artificial Sequence: Synthetic oligonucleotide
ggaaacauggcuuuauguc

SEQ ID NO: 6035 - RNA, 19 nt, Artificial Sequence
  Description of Artificial Sequence: Synthetic oligonucleotide
aggaaacauggcuuuaugu

SEQ ID NO: 6036 - RNA, 19 nt, Artificial Sequence
  Description of Artificial Sequence: Synthetic oligonucleotide
gaggaaacauggcuuuaug

SEQ ID NO: 6037 - RNA, 19 nt, Artificial Sequence
  Description of Artificial Sequence: Synthetic oligonucleotide
agaggaaacauggcuuuau

SEQ ID NO: 6038 - RNA, 19 nt, Artificial Sequence
  Description of Artificial Sequence: Synthetic oligonucleotide
aagaggaaacauggcuuua

SEQ ID NO: 6039 - RNA, 19 nt, Artificial Sequence
  Description of Artificial Sequence: Synthetic oligonucleotide
aaagaggaaacauggcuuu

SEQ ID NO: 6040 - RNA, 19 nt, Artificial Sequence
  Description of Artificial Sequence: Synthetic oligonucleotide
uaaagaggaaacauggcuu

SEQ ID NO: 6041 - RNA, 19 nt, Artificial Sequence
  Description of Artificial Sequence: Synthetic oligonucleotide
auaaagaggaaacauggcu

SEQ ID NO: 6042 - RNA, 19 nt, Artificial Sequence
  Description of Artificial Sequence: Synthetic oligonucleotide
cauaaagaggaaacauggc

SEQ ID NO: 6043 - RNA, 19 nt, Artificial Sequence
  Description of Artificial Sequence: Synthetic oligonucleotide
gcauaaagaggaaacaugg

SEQ ID NO: 6044 - RNA, 19 nt, Artificial Sequence
  Description of Artificial Sequence: Synthetic oligonucleotide
ggcauaaagaggaaacaug

SEQ ID NO: 6045 - RNA, 19 nt, Artificial Sequence
  Description of Artificial Sequence: Synthetic oligonucleotide
aggcauaaagaggaaacau

SEQ ID NO: 6046 - RNA, 19 nt, Artificial Sequence
  Description of Artificial Sequence: Synthetic oligonucleotide
caggcauaaagaggaaaca

SEQ ID NO: 6047 - RNA, 19 nt, Artificial Sequence
  Description of Artificial Sequence: Synthetic oligonucleotide
acaggcauaaagaggaaac

SEQ ID NO: 6048 - RNA, 19 nt, Artificial Sequence
  Description of Artificial Sequence: Synthetic oligonucleotide
uacaggcauaaagaggaaa

SEQ ID NO: 6049 - RNA, 21 nt, Artificial Sequence
  Description of Artificial Sequence: Synthetic oligonucleotide
agcuggggcaaguaauuuauu

SEQ ID NO: 6050 - RNA, 21 nt, Artificial Sequence
  Description of Artificial Sequence: Synthetic oligonucleotide
aaaaguuuaaugucacccauu

SEQ ID NO: 6051 - RNA, 21 nt, Artificial Sequence
  Description of Artificial Sequence: Synthetic oligonucleotide
uuaaugucacccaggggcauu

SEQ ID NO: 6052 - RNA, 21 nt, Artificial Sequence
  Description of Artificial Sequence: Synthetic oligonucleotide
ucaaguguccccaccaaaauu

SEQ ID NO: 6053 - RNA, 21 nt, Artificial Sequence
  Description of Artificial Sequence: Synthetic oligonucleotide
ccaccaaaccuuccuaacauu

SEQ ID NO: 6054 - RNA, 21 nt, Artificial Sequence
  Description of Artificial Sequence: Synthetic oligonucleotide
caccaaaccuuccuaacaauu

SEQ ID NO: 6055 - RNA, 21 nt, Artificial Sequence
  Description of Artificial Sequence: Synthetic oligonucleotide
cccuugcaacugaccuauauu

SEQ ID NO: 6056 - RNA, 21 nt, Artificial Sequence
  Description of Artificial Sequence: Synthetic oligonucleotide
uugcaacugaccuaugggauu

SEQ ID NO: 6057 - RNA, 21 nt, Artificial Sequence
  Description of Artificial Sequence: Synthetic oligonucleotide
ugcaacugaccuaugggaauu

SEQ ID NO: 6058 - RNA, 21 nt, Artificial Sequence
  Description of Artificial Sequence: Synthetic oligonucleotide
aaucccguagggacagguauu

SEQ ID NO: 6059 - RNA, 21 nt, Artificial Sequence
  Description of Artificial Sequence: Synthetic oligonucleotide
aacaaugggguuggguacauu

SEQ ID NO: 6060 - RNA, 21 nt, Artificial Sequence
  Description of Artificial Sequence: Synthetic oligonucleotide
cgacaacuauugccggaaauu

SEQ ID NO: 6061 - RNA, 21 nt, Artificial Sequence
  Description of Artificial Sequence: Synthetic oligonucleotide
gacaacuauugccggaauauu

SEQ ID NO: 6062 - RNA, 21 nt, Artificial Sequence
  Description of Artificial Sequence: Synthetic oligonucleotide
uacacuacggauccgcagauu

SEQ ID NO: 6063 - RNA, 21 nt, Artificial Sequence
  Description of Artificial Sequence: Synthetic oligonucleotide
aucgagcgagaguucuguauu

SEQ ID NO: 6064 - RNA, 21 nt, Artificial Sequence
  Description of Artificial Sequence: Synthetic oligonucleotide
caagccgcaguucacguuauu

SEQ ID NO: 6065 - RNA, 21 nt, Artificial Sequence
  Description of Artificial Sequence: Synthetic oligonucleotide
aagccgcaguucacguuuauu

SEQ ID NO: 6066 - RNA, 21 nt, Artificial Sequence
  Description of Artificial Sequence: Synthetic oligonucleotide
agccgcaguucacguuuaauu

SEQ ID NO: 6067 - RNA, 21 nt, Artificial Sequence
  Description of Artificial Sequence: Synthetic oligonucleotide
gacagucagcuugcggaaauu

SEQ ID NO: 6068 - RNA, 21 nt, Artificial Sequence
  Description of Artificial Sequence: Synthetic oligonucleotide
acagucagcuugcggaauauu

SEQ ID NO: 6069 - RNA, 21 nt, Artificial Sequence
  Description of Artificial Sequence: Synthetic oligonucleotide
cgggcuaugagguaugguauu

SEQ ID NO: 6070 - RNA, 21 nt, Artificial Sequence
  Description of Artificial Sequence: Synthetic oligonucleotide
gggcuaugagguaugguuauu

SEQ ID NO: 6071 - RNA, 21 nt, Artificial Sequence
  Description of Artificial Sequence: Synthetic oligonucleotide
ccugaaugguauguggugauu

SEQ ID NO: 6072 - RNA, 21 nt, Artificial Sequence
  Description of Artificial Sequence: Synthetic oligonucleotide
guaaugacacaguccuaaauu

SEQ ID NO: 6073 - RNA, 21 nt, Artificial Sequence
  Description of Artificial Sequence: Synthetic oligonucleotide
uaaugacacaguccuaaaauu

SEQ ID NO: 6074 - RNA, 21 nt, Artificial Sequence
  Description of Artificial Sequence: Synthetic oligonucleotide
cacaguccuaaauguggcauu

SEQ ID NO: 6075 - RNA, 21 nt, Artificial Sequence
  Description of Artificial Sequence: Synthetic oligonucleotide
caguccuaaauguggccuauu

SEQ ID NO: 6076 - RNA, 21 nt, Artificial Sequence
  Description of Artificial Sequence: Synthetic oligonucleotide
uccaaccaggaguguaacauu

SEQ ID NO: 6077 - RNA, 21 nt, Artificial Sequence
  Description of Artificial Sequence: Synthetic oligonucleotide
caaccaggaguguaacauauu

SEQ ID NO: 6078 - RNA, 21 nt, Artificial Sequence
  Description of Artificial Sequence: Synthetic oligonucleotide
ccaggaguguaacaucaaauu

SEQ ID NO: 6079 - RNA, 21 nt, Artificial Sequence
  Description of Artificial Sequence: Synthetic oligonucleotide
gaguguaacaucaagcacauu

SEQ ID NO: 6080 - RNA, 21 nt, Artificial Sequence
  Description of Artificial Sequence: Synthetic oligonucleotide
ugccugcuuuacccacaaauu

SEQ ID NO: 6081 - RNA, 21 nt, Artificial Sequence
  Description of Artificial Sequence: Synthetic oligonucleotide
gguccuggaaggaauuauauu

SEQ ID NO: 6082 - RNA, 21 nt, Artificial Sequence
  Description of Artificial Sequence: Synthetic oligonucleotide
uauaauccccaaccgaguauu

SEQ ID NO: 6083 - RNA, 21 nt, Artificial Sequence
  Description of Artificial Sequence: Synthetic oligonucleotide
ucuucacgcgugucucugauu

SEQ ID NO: 6084 - RNA, 21 nt, Artificial Sequence
  Description of Artificial Sequence: Synthetic oligonucleotide
cacgcgugucucuguguuauu

SEQ ID NO: 6085 - RNA, 21 nt, Artificial Sequence
  Description of Artificial Sequence: Synthetic oligonucleotide
aacuucuugucagacauaauu

SEQ ID NO: 6086 - RNA, 21 nt, Artificial Sequence
  Description of Artificial Sequence: Synthetic oligonucleotide
cuucuugucagacauaaaauu

SEQ ID NO: 6087 - RNA, 21 nt, Artificial Sequence
  Description of Artificial Sequence: Synthetic oligonucleotide
uaaauuacuugccccagcuuu

SEQ ID NO: 6088 - RNA, 21 nt, Artificial Sequence
  Description of Artificial Sequence: Synthetic oligonucleotide
ugggugacauuaaacuuuuuu

SEQ ID NO: 6089 - RNA, 21 nt, Artificial Sequence
  Description of Artificial Sequence: Synthetic oligonucleotide
ugccccugggugacauuaauu

SEQ ID NO: 6090 - RNA, 21 nt, Artificial Sequence
  Description of Artificial Sequence: Synthetic oligonucleotide
uuuugguggggacacuugauu

SEQ ID NO: 6091 - RNA, 21 nt, Artificial Sequence
  Description of Artificial Sequence: Synthetic oligonucleotide
uguuaggaagguuuggugguu

SEQ ID NO: 6092 - RNA, 21 nt, Artificial Sequence
  Description of Artificial Sequence: Synthetic oligonucleotide
uuguuaggaagguuugguguu

SEQ ID NO: 6093 - RNA, 21 nt, Artificial Sequence
  Description of Artificial Sequence: Synthetic oligonucleotide
uauaggucaguugcaaggguu

SEQ ID NO: 6094 - RNA, 21 nt, Artificial Sequence
  Description of Artificial Sequence: Synthetic oligonucleotide
ucccauaggucaguugcaauu

SEQ ID NO: 6095 - RNA, 21 nt, Artificial Sequence
  Description of Artificial Sequence: Synthetic oligonucleotide
uucccauaggucaguugcauu

SEQ ID NO: 6096 - RNA, 21 nt, Artificial Sequence
  Description of Artificial Sequence: Synthetic oligonucleotide
uaccugucccuacgggauuuu

SEQ ID NO: 6097 - RNA, 21 nt, Artificial Sequence
  Description of Artificial Sequence: Synthetic oligonucleotide
uguacccaaccccauuguuuu

SEQ ID NO: 6098 - RNA, 21 nt, Artificial Sequence
  Description of Artificial Sequence: Synthetic oligonucleotide
uuuccggcaauaguugucguu

SEQ ID NO: 6099 - RNA, 21 nt, Artificial Sequence
  Description of Artificial Sequence: Synthetic oligonucleotide
uauuccggcaauaguugucuu

SEQ ID NO: 6100 - RNA, 21 nt, Artificial Sequence
  Description of Artificial Sequence: Synthetic oligonucleotide
ucugcggauccguaguguauu

SEQ ID NO: 6101 - RNA, 21 nt, Artificial Sequence
  Description of Artificial Sequence: Synthetic oligonucleotide
uacagaacucucgcucgauuu

SEQ ID NO: 6102 - RNA, 21 nt, Artificial Sequence
  Description of Artificial Sequence: Synthetic oligonucleotide
uaacgugaacugcggcuuguu

SEQ ID NO: 6103 - RNA, 21 nt, Artificial Sequence
  Description of Artificial Sequence: Synthetic oligonucleotide
uaaacgugaacugcggcuuuu

SEQ ID NO: 6104 - RNA, 21 nt, Artificial Sequence
  Description of Artificial Sequence: Synthetic oligonucleotide
uuaaacgugaacugcggcuuu

SEQ ID NO: 6105 - RNA, 21 nt, Artificial Sequence
  Description of Artificial Sequence: Synthetic oligonucleotide
uuuccgcaagcugacugucuu

SEQ ID NO: 6106 - RNA, 21 nt, Artificial Sequence
  Description of Artificial Sequence: Synthetic oligonucleotide
uauuccgcaagcugacuguuu

SEQ ID NO: 6107 - RNA, 21 nt, Artificial Sequence
  Description of Artificial Sequence: Synthetic oligonucleotide
uaccauaccucauagcccguu

SEQ ID NO: 6108 - RNA, 21 nt, Artificial Sequence
  Description of Artificial Sequence: Synthetic oligonucleotide
uaaccauaccucauagcccuu

SEQ ID NO: 6109 - RNA, 21 nt, Artificial Sequence
  Description of Artificial Sequence: Synthetic oligonucleotide
ucaccacauaccauucagguu

SEQ ID NO: 6110 - RNA, 21 nt, Artificial Sequence
  Description of Artificial Sequence: Synthetic oligonucleotide
uuuaggacugugucauuacuu

SEQ ID NO: 6111 - RNA, 21 nt, Artificial Sequence
  Description of Artificial Sequence: Synthetic oligonucleotide
uuuuaggacugugucauuauu

SEQ ID NO: 6112 - RNA, 21 nt, Artificial Sequence
  Description of Artificial Sequence: Synthetic oligonucleotide
ugccacauuuaggacuguguu

SEQ ID NO: 6113 - RNA, 21 nt, Artificial Sequence
  Description of Artificial Sequence: Synthetic oligonucleotide
uaggccacauuuaggacuguu

SEQ ID NO: 6114 - RNA, 21 nt, Artificial Sequence
  Description of Artificial Sequence: Synthetic oligonucleotide
uguuacacuccugguuggauu

SEQ ID NO: 6115 - RNA, 21 nt, Artificial Sequence
  Description of Artificial Sequence: Synthetic oligonucleotide
uauguuacacuccugguuguu

SEQ ID NO: 6116 - RNA, 21 nt, Artificial Sequence
  Description of Artificial Sequence: Synthetic oligonucleotide
uuugauguuacacuccugguu

SEQ ID NO: 6117 - RNA, 21 nt, Artificial Sequence
  Description of Artificial Sequence: Synthetic oligonucleotide
ugugcuugauguuacacucuu

SEQ ID NO: 6118 - RNA, 21 nt, Artificial Sequence
  Description of Artificial Sequence: Synthetic oligonucleotide
uuuguggguaaagcaggcauu

SEQ ID NO: 6119 - RNA, 21 nt, Artificial Sequence
  Description of Artificial Sequence: Synthetic oligonucleotide
uauaauuccuuccaggaccuu

SEQ ID NO: 6120 - RNA, 21 nt, Artificial Sequence
  Description of Artificial Sequence: Synthetic oligonucleotide
uacucgguuggggauuauauu

SEQ ID NO: 6121 - RNA, 21 nt, Artificial Sequence
  Description of Artificial Sequence: Synthetic oligonucleotide
ucagagacacgcgugaagauu

SEQ ID NO: 6122 - RNA, 21 nt, Artificial Sequence
  Description of Artificial Sequence: Synthetic oligonucleotide
uaacacagagacacgcguguu

SEQ ID NO: 6123 - RNA, 21 nt, Artificial Sequence
  Description of Artificial Sequence: Synthetic oligonucleotide
uuaugucugacaagaaguuuu

SEQ ID NO: 6124 - RNA, 21 nt, Artificial Sequence
  Description of Artificial Sequence: Synthetic oligonucleotide
uuuuaugucugacaagaaguu

SEQ ID NO: 6125 - RNA, 21 nt, Artificial Sequence
  Description of Artificial Sequence: Synthetic oligonucleotide
agcuggggcaaguaauuuauu

SEQ ID NO: 6126 - RNA, 21 nt, Artificial Sequence
  Description of Artificial Sequence: Synthetic oligonucleotide
aaaaguuuaaugucacccauu

SEQ ID NO: 6127 - RNA, 21 nt, Artificial Sequence
  Description of Artificial Sequence: Synthetic oligonucleotide
uuaaugucacccaggggcauu

SEQ ID NO: 6128 - RNA, 21 nt, Artificial Sequence
  Description of Artificial Sequence: Synthetic oligonucleotide
ucaaguguccccaccaaaauu

SEQ ID NO: 6129 - RNA, 21 nt, Artificial Sequence
  Description of Artificial Sequence: Synthetic oligonucleotide
ccaccaaaccuuccuaacauu

SEQ ID NO: 6130 - RNA, 21 nt, Artificial Sequence
  Description of Artificial Sequence: Synthetic oligonucleotide
caccaaaccuuccuaacaauu

SEQ ID NO: 6131 - RNA, 21 nt, Artificial Sequence
  Description of Artificial Sequence: Synthetic oligonucleotide
cccuugcaacugaccuauauu

SEQ ID NO: 6132 - RNA, 21 nt, Artificial Sequence
  Description of Artificial Sequence: Synthetic oligonucleotide
uugcaacugaccuaugggauu

SEQ ID NO: 6133 - RNA, 21 nt, Artificial Sequence
  Description of Artificial Sequence: Synthetic oligonucleotide
ugcaacugaccuaugggaauu

SEQ ID NO: 6134 - RNA, 21 nt, Artificial Sequence
  Description of Artificial Sequence: Synthetic oligonucleotide
aaucccguagggacagguauu

SEQ ID NO: 6135 - RNA, 21 nt, Artificial Sequence
  Description of Artificial Sequence: Synthetic oligonucleotide
aacaaugggguuggguacauu

SEQ ID NO: 6136 - RNA, 21 nt, Artificial Sequence
  Description of Artificial Sequence: Synthetic oligonucleotide
cgacaacuauugccggaaauu

SEQ ID NO: 6137 - RNA, 21 nt, Artificial Sequence
  Description of Artificial Sequence: Synthetic oligonucleotide
gacaacuauugccggaauauu

SEQ ID NO: 6138 - RNA, 21 nt, Artificial Sequence
  Description of Artificial Sequence: Synthetic oligonucleotide
uacacuacggauccgcagauu

SEQ ID NO: 6139 - RNA, 21 nt, Artificial Sequence
  Description of Artificial Sequence: Synthetic oligonucleotide
aucgagcgagaguucuguauu

SEQ ID NO: 6140 - RNA, 21 nt, Artificial Sequence
  Description of Artificial Sequence: Synthetic oligonucleotide
caagccgcaguucacguuauu

SEQ ID NO: 6141 - RNA, 21 nt, Artificial Sequence
  Description of Artificial Sequence: Synthetic oligonucleotide
aagccgcaguucacguuuauu

SEQ ID NO: 6142 - RNA, 21 nt, Artificial Sequence
  Description of Artificial Sequence: Synthetic oligonucleotide
agccgcaguucacguuuaauu

SEQ ID NO: 6143 - RNA, 21 nt, Artificial Sequence
  Description of Artificial Sequence: Synthetic oligonucleotide
gacagucagcuugcggaaauu

SEQ ID NO: 6144 - RNA, 21 nt, Artificial Sequence
  Description of Artificial Sequence: Synthetic oligonucleotide
acagucagcuugcggaauauu

SEQ ID NO: 6145 - RNA, 21 nt, Artificial Sequence
  Description of Artificial Sequence: Synthetic oligonucleotide
cgggcuaugagguaugguauu

SEQ ID NO: 6146 - RNA, 21 nt, Artificial Sequence
  Description of Artificial Sequence: Synthetic oligonucleotide
gggcuaugagguaugguuauu

SEQ ID NO: 6147 - RNA, 21 nt, Artificial Sequence
  Description of Artificial Sequence: Synthetic oligonucleotide
ccugaaugguauguggugauu

SEQ ID NO: 6148 - RNA, 21 nt, Artificial Sequence
  Description of Artificial Sequence: Synthetic oligonucleotide
guaaugacacaguccuaaauu

SEQ ID NO: 6149 - RNA, 21 nt, Artificial Sequence
  Description of Artificial Sequence: Synthetic oligonucleotide
uaaugacacaguccuaaaauu

SEQ ID NO: 6150 - RNA, 21 nt, Artificial Sequence
  Description of Artificial Sequence: Synthetic oligonucleotide
cacaguccuaaauguggcauu

SEQ ID NO: 6151 - RNA, 21 nt, Artificial Sequence
  Description of Artificial Sequence: Synthetic oligonucleotide
caguccuaaauguggccuauu

SEQ ID NO: 6152 - RNA, 21 nt, Artificial Sequence
  Description of Artificial Sequence: Synthetic oligonucleotide
uccaaccaggaguguaacauu

SEQ ID NO: 6153 - RNA, 21 nt, Artificial Sequence
  Description of Artificial Sequence: Synthetic oligonucleotide
caaccaggaguguaacauauu

SEQ ID NO: 6154 - RNA, 21 nt, Artificial Sequence
  Description of Artificial Sequence: Synthetic oligonucleotide
ccaggaguguaacaucaaauu

SEQ ID NO: 6155 - RNA, 21 nt, Artificial Sequence
  Description of Artificial Sequence: Synthetic oligonucleotide
gaguguaacaucaagcacauu

SEQ ID NO: 6156 - RNA, 21 nt, Artificial Sequence
  Description of Artificial Sequence: Synthetic oligonucleotide
ugccugcuuuacccacaaauu

SEQ ID NO: 6157 - RNA, 21 nt, Artificial Sequence
  Description of Artificial Sequence: Synthetic oligonucleotide
gguccuggaaggaauuauauu

SEQ ID NO: 6158 - RNA, 21 nt, Artificial Sequence
  Description of Artificial Sequence: Synthetic oligonucleotide
uauaauccccaaccgaguauu

SEQ ID NO: 6159 - RNA, 21 nt, Artificial Sequence
  Description of Artificial Sequence: Synthetic oligonucleotide
ucuucacgcgugucucugauu

SEQ ID NO: 6160 - RNA, 21 nt, Artificial Sequence
  Description of Artificial Sequence: Synthetic oligonucleotide
cacgcgugucucuguguuauu

SEQ ID NO: 6161 - RNA, 21 nt, Artificial Sequence
  Description of Artificial Sequence: Synthetic oligonucleotide
aacuucuugucagacauaauu

SEQ ID NO: 6162 - RNA, 21 nt, Artificial Sequence
  Description of Artificial Sequence: Synthetic oligonucleotide
cuucuugucagacauaaaauu

SEQ ID NO: 6163 - DNA, 2621 bp, Homo sapiens
gaagctggggcaagtaattttccccaatttacagggaaaaaccgaaattcagaaaagtttaatgtcacccaggggctggagcccagacctctggcagctctcactttcacaatgcccttgggctgactaggctgcagaggggtttcaccccaaccccagggcacctcaagtgtccccaccaaaccttcctaacacctgtccactaagctgtactaggcccttgcaactgacctatgggacctgaggcctggcccctcatggctcctgtcaccaggtctcaggtcagggtccagcaggccctgagctgacgtgtggagccagagccacccaatcccgtagggacaggtttcacaacttcccggatggggctgtggtgggtcacagtgcagcctccagccagaaggatggggtggctcccactcctgctgcttctgactcaatgcttaggggtccctgggcagcgctcgccattgaatgacttccaagtgctccggggcacagagctacagcacctgctacatgcggtggtgcccgggccttggcaggaggatgtggcagatgctgaagagtgtgctggtcgctgtgggcccttaatggactgccgggccttccactacaacgtgagcagccatggttgccaactgctgccatggactcaacactcgccccacacgaggctgcggcgttctgggcgctgtgacctcttccagaagaaagactacgtacggacctgcatcatgaacaatggggttgggtaccggggcaccatggccacgaccgtgggtggcctgccctgccaggcttggagccacaagttcccaaatgatcacaagtacacgcccactctccggaatggcctggaagagaacttctgccgtaaccctgatggcgaccccggaggtccttggtgctacacaacagaccctgctgtgcgcttccagagctgcggcatcaaatcctgccgggaggccgcgtgtgtctggtgcaatggcgaggaataccgcggcgcggtagaccgcacggagtcagggcgcgagtgccagcgctgggatcttcagcacccgcaccagcaccccttcgagccgggcaagttcctcgaccaaggtctggacgacaactattgccggaatcctgacggctccgagcggccatggtgctacactacggatccgcagatcgagcgagagttctgtgacctcccccgctgcgggtccgaggcacagccccgccaagaggccacaactgtcagctgcttccgcgggaagggtgagggctaccggggcacagccaataccaccactgcgggcgtaccttgccagcgttgggacgcgcaaatcccgcatcagcaccgatttacgccagaaaaatacgcgtgcaaagaccttcgggagaacttctgccggaaccccgacggctcagaggcgccctggtgcttcacactgcggcccggcatgcgcgcggccttttgctaccagatccggcgttgtacagacgacgtgcggccccaggactgctaccacggcgcaggggagcagtaccgcggcacggtcagcaagacccgcaagggtgtccagtgccagcgctggtccgctgagacgccgcacaagccgcagttcacgtttacctccgaaccgcatgcacaactggaggagaacttctgccggaacccagatggggatagccatgggccctggtgctacacgatggacccaaggaccccattcgactactgtgccctgcgacgctgcgctgatgaccagccgccatcaatcctggaccccccagaccaggtgcagtttgagaagtgtggcaagagggtggatcggctggatcagcggcgttccaagctgcgcgtggttgggggccatccgggcaactcaccctggacagtcagcttgcggaatcggcagggccagcatttctgcggggggtctctagtgaaggagcagtggatactgactgcccggcagtgcttctcctcctgccatatgcctctcacgggctatgaggtatggttgggcaccctgttccagaacccacagcatggagagccaagcctacagcgggtcccagtagccaagatggtgtgtgggccctcaggctcccagcttgtcctgctcaagctggagagatctgtgaccctgaaccagcgtgtggccctgatctgcctgccccctgaatggtatgtggtgcctccagggaccaagtgtgagattgcaggctggggtgagaccaaaggtacgggtaatgacacagtcctaaatgtggccttgctgaatgtcatctccaaccaggagtgtaacatcaagcaccgaggacgtgtgcgggagagtgagatgtgcactgagggactgttggcccctgtgggggcctgtgagggtgactacgggggcccacttgcctgctttacccacaactgctgggtcctggaaggaattataatccccaaccgagtatgcgcaaggtcccgctggccagctgtcttcacgcgtgtctctgtgtttgtggactggattcacaaggtcatgagactgggttaggcccagccttgatgccatatgccttggggaggacaaaacttcttgtcagacataaagccatgtttcctctttatgcctgta

SEQ ID NO: 6164 - RNA, 21 nt, Artificial Sequence
  Description of Artificial Sequence: Synthetic oligonucleotide
  modified_base (1)..(1): 2' fluoro-modified a, c, u, g, or other
  misc_feature (1)..(2): Phosphorothioate linkage
  modified_base (2)..(2): 2' O-methyl modified a, c, u, g, or other
  misc_feature (2)..(3): Phosphorothioate linkage
  modified_base (3)..(3): 2' fluoro-modified a, c, u, g, or other
  modified_base (4)..(4): 2' O-methyl modified a, c, u, g, or other
  modified_base (5)..(5): 2' fluoro-modified a, c, u, g, or other
  modified_base (6)..(6): 2' O-methyl modified a, c, u, g, or other
  modified_base (7)..(7): 2' fluoro-modified a, c, u, g, or other
  modified_base (8)..(8): 2' fluoro-modified a, c, u, g, or other
  modified_base (9)..(9): 2' fluoro-modified a, c, u, g, or other
  modified_base (10)..(10): 2' O-methyl modified a, c, u, g, or other
  modified_base (11)..(11): 2' fluoro-modified a, c, u, g, or other
  modified_base (12)..(12): 2' O-methyl modified a, c, u, g, or other
  modified_base (13)..(13): 2' fluoro-modified a, c, u, g, or other
  modified_base (14)..(14): 2' O-methyl modified a, c, u, g, or other
  modified_base (15)..(15): 2' fluoro-modified a, c, u, g, or other
  modified_base (16)..(16): 2' O-methyl modified a, c, u, g, or other
  modified_base (17)..(17): 2' fluoro-modified a, c, u, g, or other
  modified_base (18)..(18): 2' O-methyl modified a, c, u, g, or other
  modified_base (19)..(19): 2' fluoro-modified a, c, u, g, or other
  misc_feature (19)..(20): Phosphorothioate linkage
  modified_base (20)..(20): 2' O-methyl modified a, c, u, g, or other
  misc_feature (20)..(21): Phosphorothioate linkage
  modified_base (21)..(21): 2' O-methyl modified a, c, u, g, or other
nnnnnnnnnnnnnnnnnnnnn

SEQ ID NO: 6165 - RNA, 21 nt, Artificial Sequence
  Description of Artificial Sequence: Synthetic oligonucleotide
  modified_base (1)..(1): 2' O-methyl modified a, c, u, g, or other
  misc_feature (1)..(2): Phosphorothioate linkage
  modified_base (2)..(2): 2' O-methyl modified a, c, u, g, or other
  misc_feature (2)..(3): Phosphorothioate linkage
  modified_base (3)..(3): 2' O-methyl modified a, c, u, g, or other
  modified_base (4)..(4): 2' O-methyl modified a, c, u, g, or other
  modified_base (5)..(5): 2' fluoro-modified a, c, u, g, or other
  modified_base (6)..(6): 2' O-methyl modified a, c, u, g, or other
  modified_base (7)..(7): 2' fluoro-modified a, c, u, g, or other
  modified_base (8)..(8): 2' fluoro-modified a, c, u, g, or other
  modified_base (9)..(9): 2' fluoro-modified a, c, u, g, or other
  modified_base (10)..(10): 2' O-methyl modified a, c, u, g, or other
  modified_base (11)..(11): 2' O-methyl modified a, c, u, g, or other
  modified_base (12)..(12): 2' O-methyl modified a, c, u, g, or other
  modified_base (13)..(13): 2' O-methyl modified a, c, u, g, or other
  modified_base (14)..(14): 2' O-methyl modified a, c, u, g, or other
  modified_base (15)..(15): 2' O-methyl modified a, c, u, g, or other
  modified_base (16)..(16): 2' O-methyl modified a, c, u, g, or other
  modified_base (17)..(17): 2' O-methyl modified a, c, u, g, or other
  modified_base (18)..(18): 2' O-methyl modified a, c, u, g, or other
  modified_base (19)..(19): 2' O-methyl modified a, c, u, g, or other
  misc_feature (19)..(20): Phosphorothioate linkage
  modified_base (20)..(20): 2' O-methyl modified a, c, u, g, or other
  misc_feature (20)..(21): Phosphorothioate linkage
  modified_base (21)..(21): 2' O-methyl modified a, c, u, g, or other
nnnnnnnnnnnnnnnnnnnnn

SEQ ID NO: 6166 - RNA, 21 nt, Artificial Sequence
  Description of Artificial Sequence: Synthetic oligonucleotide
  modified_base (1)..(1): 2' O-methyl modified a, c, u, g, or other
  misc_feature (1)..(2): Phosphorothioate linkage
  modified_base (2)..(2): 2' O-methyl modified a, c, u, g, or other
  misc_feature (2)..(3): Phosphorothioate linkage
  modified_base (3)..(3): 2' O-methyl modified a, c, u, g, or other
  modified_base (4)..(4): 2' O-methyl modified a, c, u, g, or other
  modified_base (5)..(5): 2' fluoro-modified a, c, u, g, or other
  modified_base (6)..(6): 2' O-methyl modified a, c, u, g, or other
  modified_base (7)..(7): 2' fluoro-modified a, c, u, g, or other
  modified_base (8)..(8): 2' O-methyl modified a, c, u, g, or other
  modified_base (9)..(9): 2' fluoro-modified a, c, u, g, or other
  modified_base (10)..(10): 2' O-methyl modified a, c, u, g, or other
  modified_base (11)..(11): 2' O-methyl modified a, c, u, g, or other
  modified_base (12)..(12): 2' O-methyl modified a, c, u, g, or other
  modified_base (13)..(13): 2' O-methyl modified a, c, u, g, or other
  modified_base (14)..(14): 2' O-methyl modified a, c, u, g, or other
  modified_base (15)..(15): 2' O-methyl modified a, c, u, g, or other
  modified_base (16)..(16): 2' O-methyl modified a, c, u, g, or other
  modified_base (17)..(17): 2' O-methyl modified a, c, u, g, or other
  modified_base (18)..(18): 2' O-methyl modified a, c, u, g, or other
  modified_base (19)..(19): 2' O-methyl modified a, c, u, g, or other
  misc_feature (19)..(20): Phosphorothioate linkage
  modified_base (20)..(20): 2' O-methyl modified a, c, u, g, or other
  misc_feature (20)..(21): Phosphorothioate linkage
  modified_base (21)..(21): 2' O-methyl modified a, c, u, g, or other
nnnnnnnnnnnnnnnnnnnnn

SEQ ID NO: 6167 - RNA, 22 nt, Artificial Sequence
  Description of Artificial Sequence: Synthetic oligonucleotide
  modified_base (1)..(1): 2' fluoro-modified a, c, u, g, or other
  misc_feature (1)..(2): Phosphorothioate linkage
  modified_base (2)..(2): 2' O-methyl modified a, c, u, g, or other
  misc_feature (2)..(3): Phosphorothioate linkage
  modified_base (3)..(3): 2' fluoro-modified a, c, u, g, or other
  modified_base (4)..(4): 2' O-methyl modified a, c, u, g, or other
  modified_base (5)..(5): 2' fluoro-modified a, c, u, g, or other
  modified_base (6)..(6): 2' O-methyl modified a, c, u, g, or other
  modified_base (7)..(7): 2' fluoro-modified a, c, u, g, or other
  modified_base (8)..(8): 2' fluoro-modified a, c, u, g, or other
  modified_base (9)..(9): 2' fluoro-modified a, c, u, g, or other
  modified_base (10)..(10): 2' O-methyl modified a, c, u, g, or other
  modified_base (11)..(11): 2' fluoro-modified a, c, u, g, or other
  modified_base (12)..(12): 2' O-methyl modified a, c, u, g, or other
  modified_base (13)..(13): 2' fluoro-modified a, c, u, g, or other
  modified_base (14)..(14): 2' O-methyl modified a, c, u, g, or other
  modified_base (15)..(15): 2' fluoro-modified a, c, u, g, or other
  modified_base (16)..(16): 2' O-methyl modified a, c, u, g, or other
  modified_base (17)..(17): 2' fluoro-modified a, c, u, g, or other
  modified_base (18)..(18): 2' O-methyl modified a, c, u, g, or other
  modified_base (19)..(19): 2' fluoro-modified a, c, u, g, or other
  misc_feature (19)..(20): Phosphorothioate linkage
  modified_base (20)..(20): 2' O-methyl modified a, c, u, g, or other
  misc_feature (20)..(21): Phosphorothioate linkage
  modified_base (21)..(21): 2' O-methyl modified a, c, u, g, or other
  modified_base (22)..(22): a, c, u, g, unknown or other
nnnnnnnnnnnnnnnnnnnnnn

SEQ ID NO: 6168 - RNA, 22 nt, Artificial Sequence
  Description of Artificial Sequence: Synthetic oligonucleotide
  modified_base (1)..(1): 2' O-methyl modified a, c, u, g, or other
  misc_feature (1)..(2): Phosphorothioate linkage
  modified_base (2)..(2): 2' O-methyl modified a, c, u, g, or other
  misc_feature (2)..(3): Phosphorothioate linkage
  modified_base (3)..(3): 2' O-methyl modified a, c, u, g, or other
  modified_base (4)..(4): 2' O-methyl modified a, c, u, g, or other
  modified_base (5)..(5): 2' fluoro-modified a, c, u, g, or other
  modified_base (6)..(6): 2' O-methyl modified a, c, u, g, or other
  modified_base (7)..(7): 2' fluoro-modified a, c, u, g, or other
  modified_base (8)..(8): 2' fluoro-modified a, c, u, g, or other
  modified_base (9)..(9): 2' fluoro-modified a, c, u, g, or other
  modified_base (10)..(10): 2' O-methyl modified a, c, u, g, or other
  modified_base (11)..(11): 2' O-methyl modified a, c, u, g, or other
  modified_base (12)..(12): 2' O-methyl modified a, c, u, g, or other
  modified_base (13)..(13): 2' O-methyl modified a, c, u, g, or other
  modified_base (14)..(14): 2' O-methyl modified a, c, u, g, or other
  modified_base (15)..(15): 2' O-methyl modified a, c, u, g, or other
  modified_base (16)..(16): 2' O-methyl modified a, c, u, g, or other
  modified_base (17)..(17): 2' O-methyl modified a, c, u, g, or other
  modified_base (18)..(18): 2' O-methyl modified a, c, u, g, or other
  modified_base (19)..(19): 2' O-methyl modified a, c, u, g, or other
  misc_feature (19)..(20): Phosphorothioate linkage
  modified_base (20)..(20): 2' O-methyl modified a, c, u, g, or other
  misc_feature (20)..(21): Phosphorothioate linkage
  modified_base (21)..(21): 2' O-methyl modified a, c, u, g, or other
  modified_base (22)..(22): a, c, u, g, unknown or other
nnnnnnnnnnnnnnnnnnnnnn

SEQ ID NO: 6169 - RNA, 21 nt, Artificial Sequence
  Description of Artificial Sequence: Synthetic oligonucleotide
  modified_base (1)..(1): 2' fluoro-modified a, c, u, g, or other
  misc_feature (1)..(2): Phosphorothioate linkage
  modified_base (2)..(2): 2' O-methyl modified a, c, u, g, or other
  misc_feature (2)..(3): Phosphorothioate linkage
  modified_base (3)..(3): 2' fluoro-modified a, c, u, g, or other
  modified_base (4)..(4): 2' O-methyl modified a, c, u, g, or other
  modified_base (5)..(5): 2' fluoro-modified a, c, u, g, or other
  modified_base (6)..(6): 2' O-methyl modified a, c, u, g, or other
  modified_base (7)..(7): 2' fluoro-modified a, c, u, g, or other
  modified_base (8)..(8): 2' O-methyl modified a, c, u, g, or other
  modified_base (9)..(9): 2' fluoro-modified a, c, u, g, or other
  modified_base (10)..(10): 2' O-methyl modified a, c, u, g, or other
  modified_base (11)..(11): 2' fluoro-modified a, c, u, g, or other
  modified_base (12)..(12): 2' O-methyl modified a, c, u, g, or other
  modified_base (13)..(13): 2' fluoro-modified a, c, u, g, or other
  modified_base (14)..(14): 2' O-methyl modified a, c, u, g, or other
  modified_base (15)..(15): 2' fluoro-modified a, c, u, g, or other
  modified_base (16)..(16): 2' O-methyl modified a, c, u, g, or other
  modified_base (17)..(17): 2' fluoro-modified a, c, u, g, or other
  modified_base (18)..(18): 2' O-methyl modified a, c, u, g, or other
  modified_base (19)..(19): 2' fluoro-modified a, c, u, g, or other
  misc_feature (19)..(20): Phosphorothioate linkage
  modified_base (20)..(20): 2' O-methyl modified a, c, u, g, or other
  misc_feature (20)..(21): Phosphorothioate linkage
  modified_base (21)..(21): 2' O-methyl modified a, c, u, g, or other
nnnnnnnnnnnnnnnnnnnnn

SEQ ID NO: 6170 - RNA, 21 nt, Artificial Sequence
  Description of Artificial Sequence: Synthetic oligonucleotide
  modified_base (1)..(1): 2' O-methyl modified a, c, u, g, or other
  misc_feature (1)..(2): Phosphorothioate linkage
  modified_base (2)..(2): 2' O-methyl modified a, c, u, g, or other
  misc_feature (2)..(3): Phosphorothioate linkage
  modified_base (3)..(3): 2' O-methyl modified a, c, u, g, or other
  modified_base (4)..(4): 2' O-methyl modified a, c, u, g, or other
  modified_base (5)..(5): 2' fluoro-modified a, c, u, g, or other
  modified_base (6)..(6): 2' fluoro-modified a, c, u, g, or other
  modified_base (7)..(7): 2' fluoro-modified a, c, u, g, or other
  modified_base (8)..(8): 2' fluoro-modified a, c, u, g, or other
  modified_base (9)..(9): 2' fluoro-modified a, c, u, g, or other
  modified_base (10)..(10): 2' O-methyl modified a, c, u, g, or other
  modified_base (11)..(11): 2' O-methyl modified a, c, u, g, or other
  modified_base (12)..(12): 2' O-methyl modified a, c, u, g, or other
  modified_base (13)..(13): 2' O-methyl modified a, c, u, g, or other
  modified_base (14)..(14): 2' O-methyl modified a, c, u, g, or other
  modified_base (15)..(15): 2' O-methyl modified a, c, u, g, or other
  modified_base (16)..(16): 2' O-methyl modified a, c, u, g, or other
  modified_base (17)..(17): 2' O-methyl modified a, c, u, g, or other
  modified_base (18)..(18): 2' O-methyl modified a, c, u, g, or other
  modified_base (19)..(19): 2' O-methyl modified a, c, u, g, or other
  misc_feature (19)..(20): Phosphorothioate linkage
  modified_base (20)..(20): 2' O-methyl modified a, c, u, g, or other
  misc_feature (20)..(21): Phosphorothioate linkage
  modified_base (21)..(21): 2' O-methyl modified a, c, u, g, or other
nnnnnnnnnnnnnnnnnnnnn

SEQ ID NO: 6171 - RNA, 21 nt, Artificial Sequence
  Description of Artificial Sequence: Synthetic oligonucleotide
  modified_base (1)..(1): 2' O-methyl modified a, c, u, g, or other
  misc_feature (1)..(2): Phosphorothioate linkage
  modified_base (2)..(2): 2' O-methyl modified a, c, u, g, or other
  misc_feature (2)..(3): Phosphorothioate linkage
  modified_base (3)..(3): 2' O-methyl modified a, c, u, g, or other
  modified_base (4)..(4): 2' O-methyl modified a, c, u, g, or other
  modified_base (5)..(5): 2' O-methyl modified a, c, u, g, or other
  modified_base (6)..(6): 2' fluoro-modified a, c, u, g, or other
  modified_base (7)..(7): 2' fluoro-modified a, c, u, g, or other
  modified_base (8)..(8): 2' fluoro-modified a, c, u, g, or other
  modified_base (9)..(9): 2' fluoro-modified a, c, u, g, or other
  modified_base (10)..(10): 2' O-methyl modified a, c, u, g, or other
  modified_base (11)..(11): 2' O-methyl modified a, c, u, g, or other
  modified_base (12)..(12): 2' O-methyl modified a, c, u, g, or other
  modified_base (13)..(13): 2' O-methyl modified a, c, u, g, or other
  modified_base (14)..(14): 2' O-methyl modified a, c, u, g, or other
  modified_base (15)..(15): 2' O-methyl modified a, c, u, g, or other
  modified_base (16)..(16): 2' O-methyl modified a, c, u, g, or other
  modified_base (17)..(17): 2' O-methyl modified a, c, u, g, or other
  modified_base (18)..(18): 2' O-methyl modified a, c, u, g, or other
  modified_base (19)..(19): 2' O-methyl modified a, c, u, g, or other
  misc_feature (19)..(20): Phosphorothioate linkage
  modified_base (20)..(20): 2' O-methyl modified a, c, u, g, or other
  misc_feature (20)..(21): Phosphorothioate linkage
  modified_base (21)..(21): 2' O-methyl modified a, c, u, g, or other
nnnnnnnnnnnnnnnnnnnnn

SEQ ID NO: 6172 - RNA, 21 nt, Artificial Sequence
  Description of Artificial Sequence: Synthetic oligonucleotide
  modified_base (1)..(1): 2' O-methyl modified a, c, u, g, or other
  misc_feature (1)..(2): Phosphorothioate linkage
  modified_base (2)..(2): 2' O-methyl modified a, c, u, g, or other
  misc_feature (2)..(3): Phosphorothioate linkage
  modified_base (3)..(3): 2' O-methyl modified a, c, u, g, or other
  modified_base (4)..(4): 2' O-methyl modified a, c, u, g, or other
  modified_base (5)..(5): 2' O-methyl modified a, c, u, g, or other
  modified_base (6)..(6): 2' O-methyl modified a, c, u, g, or other
  modified_base (7)..(7): 2' fluoro-modified a, c, u, g, or other
  modified_base (8)..(8): 2' fluoro-modified a, c, u, g, or other
  modified_base (9)..(9): 2' fluoro-modified a, c, u, g, or other
  modified_base (10)..(10): 2' fluoro-modified a, c, u, g, or other
  modified_base (11)..(11): 2' O-methyl modified a, c, u, g, or other
  modified_base (12)..(12): 2' O-methyl modified a, c, u, g, or other
  modified_base (13)..(13): 2' O-methyl modified a, c, u, g, or other
  modified_base (14)..(14): 2' O-methyl modified a, c, u, g, or other
  modified_base (15)..(15): 2' O-methyl modified a, c, u, g, or other
  modified_base (16)..(16): 2' O-methyl modified a, c, u, g, or other
  modified_base (17)..(17): 2' O-methyl modified a, c, u, g, or other
  modified_base (18)..(18): 2' O-methyl modified a, c, u, g, or other
  modified_base (19)..(19): 2' O-methyl modified a, c, u, g, or other
  misc_feature (19)..(20): Phosphorothioate linkage
  modified_base (20)..(20): 2' O-methyl modified a, c, u, g, or other
  misc_feature (20)..(21): Phosphorothioate linkage
  modified_base (21)..(21): 2' O-methyl modified a, c, u, g, or other
nnnnnnnnnnnnnnnnnnnnn

SEQ ID NO: 6173 - RNA, 21 nt, Artificial Sequence
  Description of Artificial Sequence: Synthetic oligonucleotide
  modified_base (1)..(1): 2' O-methyl modified a, c, u, g, or other
  misc_feature (1)..(2): Phosphorothioate linkage
  modified_base (2)..(2): 2' fluoro-modified a, c, u, g, or other
  misc_feature (2)..(3): Phosphorothioate linkage
  modified_base (3)..(3): 2' O-methyl modified a, c, u, g, or other
  modified_base (4)..(4): 2' fluoro-modified a, c, u, g, or other
  modified_base (5)..(5): 2' O-methyl modified a, c, u, g, or other
  modified_base (6)..(6): 2' fluoro-modified a, c, u, g, or other
  modified_base (7)..(7): 2' O-methyl modified a, c, u, g, or other
  modified_base (8)..(8): 2' fluoro-modified a, c, u, g, or other
  modified_base (9)..(9): 2' O-methyl modified a, c, u, g, or other
  modified_base (10)..(10): 2' fluoro-modified a, c, u, g, or other
  modified_base (11)..(11): 2' O-methyl modified a, c, u, g, or other
  modified_base (12)..(12): 2' O-methyl modified a, c, u, g, or other
  modified_base (13)..(13): 2' O-methyl modified a, c, u, g, or other
  modified_base (14)..(14): 2' fluoro-modified a, c, u, g, or other
  modified_base (15)..(15): 2' O-methyl modified a, c, u, g, or other
  modified_base (16)..(16): 2' fluoro-modified a, c, u, g, or other
  modified_base (17)..(17): 2' O-methyl modified a, c, u, g, or other
  modified_base (18)..(18): 2' fluoro-modified a, c, u, g, or other
  modified_base (19)..(19): 2' O-methyl modified a, c, u, g, or other
  misc_feature (19)..(20): Phosphorothioate linkage
  modified_base (20)..(20): 2' O-methyl modified a, c, u, g, or other
  misc_feature (20)..(21): Phosphorothioate linkage
  modified_base (21)..(21): 2' O-methyl modified a, c, u, g, or other
nnnnnnnnnnnnnnnnnnnnn

SEQ ID NO: 6174 - RNA, 21 nt, Artificial Sequence
  Description of Artificial Sequence: Synthetic oligonucleotide
  modified_base (1)..(1): 2' O-methyl modified a, c, u, g, or other
  misc_feature (1)..(2): Phosphorothioate linkage
  modified_base (2)..(2): 2' fluoro-modified a, c, u, g, or other
  misc_feature (2)..(3): Phosphorothioate linkage
  modified_base (3)..(3): 2' O-methyl modified a, c, u, g, or other
  modified_base (4)..(4): 2' O-methyl modified a, c, u, g, or other
  modified_base (5)..(5): 2' O-methyl modified a, c, u, g, or other
  modified_base (6)..(6): 2' fluoro-modified a, c, u, g, or other
  modified_base (7)..(7): 2' O-methyl modified a, c, u, g, or other
  modified_base (8)..(8): 2' fluoro-modified a, c, u, g, or other
  modified_base (9)..(9): 2' fluoro-modified a, c, u, g, or other
  modified_base (10)..(10): 2' O-methyl modified a, c, u, g, or other
  modified_base (11)..(11): 2' O-methyl modified a, c, u, g, or other
  modified_base (12)..(12): 2' O-methyl modified a, c, u, g, or other
  modified_base (13)..(13): 2' O-methyl modified a, c, u, g, or other
  modified_base (14)..(14): 2' fluoro-modified a, c, u, g, or other
  modified_base (15)..(15): 2' O-methyl modified a, c, u, g, or other
  modified_base (16)..(16): 2' fluoro-modified a, c, u, g, or other
  modified_base (17)..(17): 2' O-methyl modified a, c, u, g, or other
  modified_base (18)..(18): 2' O-methyl modified a, c, u, g, or other
  modified_base (19)..(19): 2' O-methyl modified a, c, u, g, or other
  misc_feature (19)..(20): Phosphorothioate linkage
  modified_base (20)..(20): 2' O-methyl modified a, c, u, g, or other
  misc_feature (20)..(21): Phosphorothioate linkage
  modified_base (21)..(21): 2' O-methyl modified a, c, u, g, or other
nnnnnnnnnnnnnnnnnnnnn

SEQ ID NO: 6175 - RNA, 21 nt, Artificial Sequence
  Description of Artificial Sequence: Synthetic oligonucleotide
  modified_base (1)..(1): 2' O-methyl modified a, c, u, g, or other
  misc_feature (1)..(2): Phosphorothioate linkage
  modified_base (2)..(2): 2' fluoro-modified a, c, u, g, or other
  misc_feature (2)..(3): Phosphorothioate linkage
  modified_base (3)..(3): 2' O-methyl modified a, c, u, g, or other
  modified_base (4)..(4): 2' O-methyl modified a, c, u, g, or other
  modified_base (5)..(5): 2' O-methyl modified a, c, u, g, or other
  modified_base (6)..(6): 2' fluoro-modified a, c, u, g, or other
  modified_base (7)..(7): 2' O-methyl modified a, c, u, g, or other
  modified_base (8)..(8): 2' O-methyl modified a, c, u, g, or other
  modified_base (9)..(9): 2' O-methyl modified a, c, u, g, or other
  modified_base (10)..(10): 2' O-methyl modified a, c, u, g, or other
  modified_base (11)..(11): 2' O-methyl modified a, c, u, g, or other
  modified_base (12)..(12): 2' O-methyl modified a, c, u, g, or other
  modified_base (13)..(13): 2' O-methyl modified a, c, u, g, or other
  modified_base (14)..(14): 2' fluoro-modified a, c, u, g, or other
  modified_base (15)..(15): 2' O-methyl modified a, c, u, g, or other
  modified_base (16)..(16): 2' fluoro-modified a, c, u, g, or other
  modified_base (17)..(17): 2' O-methyl modified a, c, u, g, or other
  modified_base (18)..(18): 2' O-methyl modified a, c, u, g, or other
  modified_base (19)..(19): 2' O-methyl modified a, c, u, g, or other
  misc_feature (19)..(20): Phosphorothioate linkage
  modified_base (20)..(20): 2' O-methyl modified a, c, u, g, or other
  misc_feature (20)..(21): Phosphorothioate linkage
  modified_base (21)..(21): 2' O-methyl modified a, c, u, g, or other
nnnnnnnnnnnnnnnnnnnnn

SEQ ID NO: 6176 - RNA, 21 nt, Artificial Sequence
  Description of Artificial Sequence: Synthetic oligonucleotide
  modified_base (1)..(1): 2' O-methyl modified a, c, u, g, or other
  misc_feature (1)..(2): Phosphorothioate linkage
  modified_base (2)..(2): 2' fluoro-modified a, c, u, g, or other
  misc_feature (2)..(3): Phosphorothioate linkage
  modified_base (3)..(3): 2' O-methyl modified a, c, u, g, or other
  modified_base (4)..(4): 2' fluoro-modified a, c, u, g, or other
  modified_base (5)..(5): 2' O-methyl modified a, c, u, g, or other
  modified_base (6)..(6): 2' fluoro-modified a, c, u, g, or other
  modified_base (7)..(7): 2' O-methyl modified a, c, u, g, or other
  modified_base (8)..(8): 2' O-methyl modified a, c, u, g, or other
  modified_base (9)..(9): 2' O-methyl modified a, c, u, g, or other
  modified_base (10)..(10): 2' O-methyl modified a, c, u, g, or other
  modified_base (11)..(11): 2' O-methyl modified a, c, u, g, or other
  modified_base (12)..(12): 2' O-methyl modified a, c, u, g, or other
  modified_base (13)..(13): 2' O-methyl modified a, c, u, g, or other
  modified_base (14)..(14): 2' fluoro-modified a, c, u, g, or other
  modified_base (15)..(15): 2' O-methyl modified a, c, u, g, or other
  modified_base (16)..(16): 2' fluoro-modified a, c, u, g, or other
  modified_base (17)..(17): 2' O-methyl modified a, c, u, g, or other
  modified_base (18)..(18): 2' O-methyl modified a, c, u, g, or other
  modified_base (19)..(19): 2' O-methyl modified a, c, u, g, or other
  misc_feature (19)..(20): Phosphorothioate linkage
  modified_base (20)..(20): 2' O-methyl modified a, c, u, g, or other
  misc_feature (20)..(21): Phosphorothioate linkage
  modified_base (21)..(21): 2' O-methyl modified a, c, u, g, or other
nnnnnnnnnnnnnnnnnnnnn

SEQ ID NO: 6177 - RNA, 21 nt, Artificial Sequence
  Description of Artificial Sequence: Synthetic oligonucleotide
  modified_base (1)..(1): 2' O-methyl modified a, c, u, g, or other
  misc_feature (1)..(2): Phosphorothioate linkage
  modified_base (2)..(2): 2' fluoro-modified a, c, u, g, or other
  misc_feature (2)..(3): Phosphorothioate linkage
  modified_base (3)..(3): 2' O-methyl modified a, c, u, g, or other
  modified_base (4)..(4): 2' O-methyl modified a, c, u, g, or other
  modified_base (5)..(5): 2' O-methyl modified a, c, u, g, or other
  modified_base (6)..(6): 2' O-methyl modified a, c, u, g, or other
  modified_base (7)..(7): 2' O-methyl modified a, c, u, g, or other
  modified_base (8)..(8): 2' O-methyl modified a, c, u, g, or other
  modified_base (9)..(9): 2' O-methyl modified a, c, u, g, or other
  modified_base (10)..(10): 2' O-methyl modified a, c, u, g, or other
  modified_base (11)..(11): 2' O-methyl modified a, c, u, g, or other
  modified_base (12)..(12): 2' O-methyl modified a, c, u, g, or other
  modified_base (13)..(13): 2' O-methyl modified a, c, u, g, or other
  modified_base (14)..(14): 2' fluoro-modified a, c, u, g, or other
  modified_base (15)..(15): 2' O-methyl modified a, c, u, g, or other
  modified_base (16)..(16): 2' fluoro-modified a, c, u, g, or other
  modified_base (17)..(17): 2' O-methyl modified a, c, u, g, or other
  modified_base (18)..(18): 2' O-methyl modified a, c, u, g, or other
  modified_base (19)..(19): 2' O-methyl modified a, c, u, g, or other
  misc_feature (19)..(20): Phosphorothioate linkage
  modified_base (20)..(20): 2' O-methyl modified a, c, u, g, or other
  misc_feature (20)..(21): Phosphorothioate linkage
  modified_base (21)..(21): 2' O-methyl modified a, c, u, g, or other
nnnnnnnnnnnnnnnnnnnnn

SEQ ID NO: 6178 - RNA, 21 nt, Artificial Sequence
  Description of Artificial Sequence: Synthetic oligonucleotide
  modified_base (1)..(1): 2' O-methyl modified a, c, u, g, or other
  misc_feature (1)..(2): Phosphorothioate linkage
  modified_base (2)..(2): 2' fluoro-modified a, c, u, g, or other
  misc_feature (2)..(3): Phosphorothioate linkage
  modified_base (3)..(3): 2' O-methyl modified a, c, u, g, or other
  modified_base (4)..(4): 2' O-methyl modified a, c, u, g, or other
  modified_base (5)..(5): 2' O-methyl modified a, c, u, g, or other
  modified_base (6)..(6): 2' fluoro-modified a, c, u, g, or other
  modified_base (7)..(7): 2' O-methyl modified a, c, u, g, or other
  modified_base (8)..(8): 2' O-methyl modified a, c, u, g, or other
  modified_base (9)..(9): 2' fluoro-modified a, c, u, g, or other
  modified_base (10)..(10): 2' O-methyl modified a, c, u, g, or other
  modified_base (11)..(11): 2' O-methyl modified a, c, u, g, or other
  modified_base (12)..(12): 2' O-methyl modified a, c, u, g, or other
  modified_base (13)..(13): 2' O-methyl modified a, c, u, g, or other
  modified_base (14)..(14): 2' fluoro-modified a, c, u, g, or other
  modified_base (15)..(15): 2' O-methyl modified a, c, u, g, or other
  modified_base (16)..(16): 2' fluoro-modified a, c, u, g, or other
  modified_base (17)..(17): 2' O-methyl modified a, c, u, g, or other
  modified_base (18)..(18): 2' O-methyl modified a, c, u, g, or other
  modified_base (19)..(19): 2' O-methyl modified a, c, u, g, or other
  misc_feature (19)..(20): Phosphorothioate linkage
  modified_base (20)..(20): 2' O-methyl modified a, c, u, g, or other
  misc_feature (20)..(21): Phosphorothioate linkage
  modified_base (21)..(21): 2' O-methyl modified a, c, u, g, or other
nnnnnnnnnnnnnnnnnnnnn

SEQ ID NO: 6179 - RNA, 21 nt, Artificial Sequence
  Description of Artificial Sequence: Synthetic oligonucleotide
  modified_base (1)..(1): 2' O-methyl modified a, c, u, g, or other
  misc_feature (1)..(2): Phosphorothioate linkage
  modified_base (2)..(2): 2' fluoro-modified a, c, u, g, or other
  misc_feature (2)..(3): Phosphorothioate linkage
  modified_base (3)..(3): 2' O-methyl modified a, c, u, g, or other
  modified_base (4)..(4): 2' fluoro-modified a, c, u, g, or other
  modified_base (5)..(5): 2' O-methyl modified a, c, u, g, or other
  modified_base (6)..(6): 2' fluoro-modified a, c, u, g, or other
  modified_base (7)..(7): 2' O-methyl modified a, c, u, g, or other
  modified_base (8)..(8): 2' fluoro-modified a, c, u, g, or other
  modified_base (9)..(9): 2' O-methyl modified a, c, u, g, or other
  modified_base (10)..(10): 2' fluoro-modified a, c, u, g, or other
  modified_base (11)..(11): 2' O-methyl modified a, c, u, g, or other
  modified_base (12)..(12): 2' fluoro-modified a, c, u, g, or other
  modified_base (13)..(13): 2' O-methyl modified a, c, u, g, or other
  modified_base (14)..(14): 2' fluoro-modified a, c, u, g, or other
  modified_base (15)..(15): 2' O-methyl modified a, c, u, g, or other
  modified_base (16)..(16): 2' fluoro-modified a, c, u, g, or other
  modified_base (17)..(17): 2' O-methyl modified a, c, u, g, or other
  modified_base (18)..(18): 2' fluoro-modified a, c, u, g, or other
  modified_base (19)..(19): 2' O-methyl modified a, c, u, g, or other
  misc_feature (19)..(20): Phosphorothioate linkage
  modified_base (20)..(20): 2' O-methyl modified a, c, u, g, or other
  misc_feature (20)..(21): Phosphorothioate linkage
  modified_base (21)..(21): 2' O-methyl modified a, c, u, g, or other
nnnnnnnnnnnnnnnnnnnnn

SEQ ID NO: 6180 - RNA, 21 nt, Artificial Sequence
  Description of Artificial Sequence: Synthetic oligonucleotide
  modified_base (1)..(1): 2' O-methyl modified a, c, u, g, or other
  misc_feature (1)..(2): Phosphorothioate linkage
  modified_base (2)..(2): 2' fluoro-modified a, c, u, g, or other
  misc_feature (2)..(3): Phosphorothioate linkage
  modified_base (3)..(3): 2' O-methyl modified a, c, u, g, or other
  modified_base (4)..(4): 2' O-methyl modified a, c, u, g, or other
  modified_base (5)..(5): 2' O-methyl modified a, c, u, g, or other
  modified_base (6)..(6): 2' O-methyl modified a, c, u, g, or other
  modified_base (7)..(7): 2' O-methyl modified a, c, u, g, or other
  modified_base (8)..(8): 2' O-methyl modified a, c, u, g, or other
  modified_base (9)..(9): 2' O-methyl modified a, c, u, g, or other
  modified_base (10)..(10): 2' O-methyl modified a, c, u, g, or other
  modified_base (11)..(11): 2' O-methyl modified a, c, u, g, or other
  modified_base (12)..(12): 2' O-methyl modified a, c, u, g, or other
  modified_base (13)..(13): 2' O-methyl modified a, c, u, g, or other
  modified_base (14)..(14): 2' fluoro-modified a, c, u, g, or other
  modified_base (15)..(15): 2' O-methyl modified a, c, u, g, or other
  modified_base (16)..(16): 2' O-methyl modified a, c, u, g, or other
  modified_base (17)..(17): 2' O-methyl modified a, c, u, g, or other
  modified_base (18)..(18): 2' O-methyl modified a, c, u, g, or other
  modified_base (19)..(19): 2' O-methyl modified a, c, u, g, or other
  misc_feature (19)..(20): Phosphorothioate linkage
  modified_base (20)..(20): 2' O-methyl modified a, c, u, g, or other
  misc_feature (20)..(21): Phosphorothioate linkage
  modified_base (21)..(21): 2' O-methyl modified a, c, u, g, or other
nnnnnnnnnnnnnnnnnnnnn

SEQ ID NO: 6181 - DNA, 20 bp, Artificial Sequence
  Description of Artificial Sequence: Synthetic oligonucleotide
  Description of Combined DNA/RNA Molecule: Synthetic oligonucleotide
  modified_base (1)..(1): 2' O-methyl modified a, c, u, g, or other
  misc_feature (1)..(2): Phosphorothioate linkage
  modified_base (2)..(2): 2' O-methyl modified a, c, u, g, or other
  misc_feature (2)..(3): Phosphorothioate linkage
  modified_base (3)..(3): 2' O-methyl modified a, c, u, g, or other
  misc_feature (3)..(4): Phosphorothioate linkage
  modified_base (4)..(4): 2' O-methyl modified a, c, u, g, or other
  misc_feature (4)..(5): Phosphorothioate linkage
  modified_base (5)..(5): 2' O-methyl modified a, c, u, g, or other
  misc_feature (5)..(6): Phosphorothioate linkage
  modified_base (6)..(6): 2' deoxy-modified a, c, u, g, or other
  misc_feature (6)..(7): Phosphorothioate linkage
  modified_base (7)..(7): 2' deoxy-modified a, c, u, g, or other
  misc_feature (7)..(8): Phosphorothioate linkage
  modified_base (8)..(8): 2' deoxy-modified a, c, u, g, or other
  misc_feature (8)..(9): Phosphorothioate linkage
  modified_base (9)..(9): 2' deoxy-modified a, c, u, g, or other
  misc_feature (9)..(10): Phosphorothioate linkage
  modified_base (10)..(10): 2' deoxy-modified a, c, u, g, or other
  misc_feature (10)..(11): Phosphorothioate linkage
  modified_base (11)..(11): 2' deoxy-modified a, c, u, g, or other
  misc_feature (11)..(12): Phosphorothioate linkage
  modified_base (12)..(12): 2' deoxy-modified a, c, u, g, or other
  misc_feature (12)..(13): Phosphorothioate linkage
  modified_base (13)..(13): 2' deoxy-modified a, c, u, g, or other
  misc_feature (13)..(14): Phosphorothioate linkage
  modified_base (14)..(14): 2' deoxy-modified a, c, u, g, or other
  misc_feature (14)..(15): Phosphorothioate linkage
  modified_base (15)..(15): 2' deoxy-modified a, c, u, g, or other
  misc_feature (15)..(16): Phosphorothioate linkage
  modified_base (16)..(16): 2' O-methyl modified a, c, u, g, or other
  misc_feature (16)..(17): Phosphorothioate linkage
  modified_base (17)..(17): 2' O-methyl modified a, c, u, g, or other
  misc_feature (17)..(18): Phosphorothioate linkage
  modified_base (18)..(18): 2' O-methyl modified a, c, u, g, or other
  misc_feature (18)..(19): Phosphorothioate linkage
  modified_base (19)..(19): 2' O-methyl modified a, c, u, g, or other
  misc_feature (19)..(20): Phosphorothioate linkage
  modified_base (20)..(20): 2' O-methyl modified a, c, u, g, or other
nnnnnnnnnnnnnnnnnnnn

SEQ ID NO: 6182 - protein, 5 aa, Artificial Sequence
  Description of Artificial Sequence: Synthetic peptide
  MOD_RES (4)..(4): D-amino acid
RGDFC

SEQ ID NO: 6183 - protein, 5 aa, Artificial Sequence
  Description of Artificial Sequence: Synthetic peptide
  MOD_RES (4)..(4): D-amino acid
RGDFK

SEQ ID NO: 6184 - protein, 4 aa, Artificial Sequence
  Description of Artificial Sequence: Synthetic peptide
  MOD_RES (4)..(4): D-amino acid
RGDF

SEQ ID NO: 6185 - DNA, 3042 bp, Homo sapiens
cagcctccgctaggggaccccctccatggcttcccaccgggttgttccaggcctcagcttcgccgaaaggcctcaccacctccgacctccgcctgctctggggatgctcccagccctgctgcggcagaacgcgacatgctaaccggaatccctaggccgcctgtctcctacccatacttagaggccccgctcagacggtccttaaaacgtctgaaaggccgttcctgccagagtccctgctacctgttacctccacccctatttagtcctagtggacagcctcgctcaccttccctgggatgacacttctggcggctgagatgagcgagcctctctgggctctgccgccgggtgtgggctgacctgcctacagctggggcctgataaggcagcagcaaaagggtggaggggaggcagtgttgaagctggggcaagtaattttccccaatttacagggaaaaaccgaaattcagaaaagtttaatgtcacccaggggctggagcccagacctctggcagctctcactttcacaatgcccttgggctgactaggctgcagaggggtttcaccccaaccccagggcacctcaagtgtccccaccaaaccttcctaacacctgtccactaagctgtactaggcccttgcaactgacctatgggacctgaggcctggcccctcatggctcctgtcaccaggtctcaggtcagggtccagcaggccctgagctgacgtgtggagccagagccacccaatcccgtagggacaggtttcacaacttcccggatggggctgtggtgggtcacagtgcagcctccagccagaaggatggggtggctcccactcctgctgcttctgactcaatgcttaggggtccctgggcagcgctcgccattgaatgacttccaagtgctccggggcacagagctacagcacctgctacatgcggtggtgcccgggccttggcaggaggatgtggcagatgctgaagagtgtgctggtcgctgtgggcccttaatggactgccgggccttccactacaacgtgagcagccatggttgccaactgctgccatggactcaacactcgccccacacgaggctgcggcgttctgggcgctgtgacctcttccagaagaaagactacgtacggacctgcatcatgaacaatggggttgggtaccggggcaccatggccacgaccgtgggtggcctgccctgccaggcttggagccacaagttcccaaatgatcacaagtacacgcccactctccggaatggcctggaagagaacttctgccgtaaccctgatggcgaccccggaggtccttggtgctacacaacagaccctgctgtgcgcttccagagctgcggcatcaaatcctgccgggaggccgcgtgtgtctggtgcaatggcgaggaataccgcggcgcggtagaccgcacggagtcagggcgcgagtgccagcgctgggatcttcagcacccgcaccagcaccccttcgagccgggcaagttcctcgaccaaggtctggacgacaactattgccggaatcctgacggctccgagcggccatggtgctacactacggatccgcagatcgagcgagagttctgtgacctcccccgctgcgggtccgaggcacagccccgccaagaggccacaactgtcagctgcttccgcgggaagggtgagggctaccggggcacagccaataccaccactgcgggcgtaccttgccagcgttgggacgcgcaaatcccgcatcagcaccgatttacgccagaaaaatacgcgtgcaaagaccttcgggagaacttctgccggaaccccgacggctcagaggcgccctggtgcttcacactgcggcccggcatgcgcgcggccttttgctaccagatccggcgttgtacagacgacgtgcggccccaggactgctaccacggcgcaggggagcagtaccgcggcacggtcagcaagacccgcaagggtgtccagtgccagcgctggtccgctgagacgccgcacaagccgcagttcacgtttacctccgaaccgcatgcacaactggaggagaacttctgccggaacccagatggggatagccatgggccctggtgctacacgatggacccaaggaccccattcgactactgtgccctgcgacgctgcgctgatgaccagccgccatcaatcctggaccccccagaccaggtgcagtttgagaagtgtggcaagagggtggatcggctggatcagcggcgttccaagctgcgcgtggttgggggccatccgggcaactcaccctggacagtcagcttgcggaatcggcagggccagcatttctgcggggggtctctagtgaaggagcagtggatactgactgcccggcagtgcttctcctcctgccatatgcctctcacgggctatgaggtatggttgggcaccctgttccagaacccacagcatggagagccaagcctacagcgggtcccagtagccaagatggtgtgtgggccctcaggctcccagcttgtcctgctcaagctggagagatctgtgaccctgaaccagcgtgtggccctgatctgcctgccccctgaatggtatgtggtgcctccagggaccaagtgtgagattgcaggctggggtgagaccaaaggtacgggtaatgacacagtcctaaatgtggccttgctgaatgtcatctccaaccaggagtgtaacatcaagcaccgaggacgtgtgcgggagagtgagatgtgcactgagggactgttggcccctgtgggggcctgtgagggtgactacgggggcccacttgcctgctttacccacaactgctgggtcctggaaggaattataatccccaaccgagtatgcgcaaggtcccgctggccagctgtcttcacgcgtgtctctgtgtttgtggactggattcacaaggtcatgagactgggttaggcccagccttgatgccatatgccttggggaggacaaaacttcttgtcagacataaagccatgtttcctctttatgcctgta

SEQ ID NO: 6186 - RNA, 21 nt, Artificial Sequence
  Description of Artificial Sequence: Synthetic oligonucleotide
cuucuugucagacauaaaauu

SEQ ID NO: 6187 - RNA, 21 nt, Artificial Sequence
  Description of Artificial Sequence: Synthetic oligonucleotide
aaaaguuuaaugucacccauu

SEQ ID NO: 6188 - DNA, 21 bp, Artificial Sequence
  Description of Artificial Sequence: Synthetic oligonucleotide
  Description of Combined DNA/RNA Molecule: Synthetic oligonucleotide
aacuucuugucagacauaauu

SEQ ID NO: 6189 - DNA, 21 bp, Artificial Sequence
  Description of Artificial Sequence: Synthetic oligonucleotide
  Description of Combined DNA/RNA Molecule: Synthetic oligonucleotide
uaaugacacaguccuaaaauu

SEQ ID NO: 6190 - RNA, 21 nt, Artificial Sequence
  Description of Artificial Sequence: Synthetic oligonucleotide
guaaugacacaguccuaaauu

SEQ ID NO: 6191 - RNA, 21 nt, Artificial Sequence
  Description of Artificial Sequence: Synthetic oligonucleotide
gguccuggaaggaauuauauu

SEQ ID NO: 6192 - RNA, 21 nt, Artificial Sequence
  Description of Artificial Sequence: Synthetic oligonucleotide
caaccaggaguguaacauauu

SEQ ID NO: 6193 - RNA, 21 nt, Artificial Sequence
  Description of Artificial Sequence: Synthetic oligonucleotide
ccugaaugguauguggugauu

SEQ ID NO: 6194 - RNA, 21 nt, Artificial Sequence
  Description of Artificial Sequence: Synthetic oligonucleotide
cacaguccuaaauguggcauu

SEQ ID NO: 6195 - RNA, 21 nt, Artificial Sequence
  Description of Artificial Sequence: Synthetic oligonucleotide
caagccgcaguucacguuauu

SEQ ID NO: 6196 - RNA, 21 nt, Artificial Sequence
  Description of Artificial Sequence: Synthetic oligonucleotide
ucuucacgcgugucucugauu

SEQ ID NO: 6197 - RNA, 21 nt, Artificial Sequence
  Description of Artificial Sequence: Synthetic oligonucleotide
acuauugccggaauccugauu

SEQ ID NO: 6198 - RNA, 21 nt, Artificial Sequence
  Description of Artificial Sequence: Synthetic oligonucleotide
auucgacuacugugcccuauu

SEQ ID NO: 6199 - RNA, 21 nt, Artificial Sequence
  Description of Artificial Sequence: Synthetic oligonucleotide
aguuugagaaguguggcaauu

SEQ ID NO: 6200 - RNA, 21 nt, Artificial Sequence
  Description of Artificial Sequence: Synthetic oligonucleotide
augacacaguccuaaaugauu

SEQ ID NO: 6201 - RNA, 21 nt, Artificial Sequence
  Description of Artificial Sequence: Synthetic oligonucleotide
acaaaacuucuugucagaauu

SEQ ID NO: 6202 - RNA, 21 nt, Artificial Sequence
  Description of Artificial Sequence: Synthetic oligonucleotide
acuucuugucagacauaaauu

SEQ ID NO: 6203 - RNA, 21 nt, Artificial Sequence
  Description of Artificial Sequence: Synthetic oligonucleotide
gguccuggaaggaauuauauu

SEQ ID NO: 6204 - DNA, 21 bp, Artificial Sequence
  Description of Artificial Sequence: Synthetic oligonucleotide
  Description of Combined DNA/RNA Molecule: Synthetic oligonucleotide
aacuucuugucagacauaauu

SEQ ID NO: 6205 - RNA, 21 nt, Artificial Sequence
  Description of Artificial Sequence: Synthetic oligonucleotide
cuucuugucagacauaaaauu

SEQ ID NO: 6206 - RNA, 21 nt, Artificial Sequence
  Description of Artificial Sequence: Synthetic oligonucleotide
caaccaggaguguaacauauu

SEQ ID NO: 6207 - RNA, 21 nt, Artificial Sequence
  Description of Artificial Sequence: Synthetic oligonucleotide
cuucuugucagacauaaauuu

SEQ ID NO: 6208 - RNA, 21 nt, Artificial Sequence
  Description of Artificial Sequence: Synthetic oligonucleotide
cuucuugucagacauaaaauu

SEQ ID NO: 6209 - RNA, 21 nt, Artificial Sequence
  Description of Artificial Sequence: Synthetic oligonucleotide
cuucuugucagacauaaaauu

SEQ ID NO: 6210 - RNA, 21 nt, Artificial Sequence
  Description of Artificial Sequence: Synthetic oligonucleotide
cuucuugucagacauaaaauu

SEQ ID NO: 6211 - RNA, 21 nt, Artificial Sequence
  Description of Artificial Sequence: Synthetic oligonucleotide
cuucuugucagacauaaaguu

SEQ ID NO: 6212 - RNA, 21 nt, Artificial Sequence
  Description of Artificial Sequence: Synthetic oligonucleotide
gguccuggaaggaauuauauu

SEQ ID NO: 6213 - RNA, 21 nt, Artificial Sequence
  Description of Artificial Sequence: Synthetic oligonucleotide
gguccuggaaggaauuauauu

SEQ ID NO: 6214 - RNA, 21 nt, Artificial Sequence
  Description of Artificial Sequence: Synthetic oligonucleotide
gguccuggaaggaauuauauu

SEQ ID NO: 6215 - RNA, 21 nt, Artificial Sequence
  Description of Artificial Sequence: Synthetic oligonucleotide
gguccuggaaggaauuauauu

SEQ ID NO: 6216 - RNA, 21 nt, Artificial Sequence
  Description of Artificial Sequence: Synthetic oligonucleotide
gguccuggaaggaauuauauu

SEQ ID NO: 6217 - RNA, 21 nt, Artificial Sequence
  Description of Artificial Sequence: Synthetic oligonucleotide
gguccuggaaggaauuauuuu

SEQ ID NO: 6218 - RNA, 21 nt, Artificial Sequence
  Description of Artificial Sequence: Synthetic oligonucleotide
gacaacuauugccggaauauu

SEQ ID NO: 6219 - RNA, 21 nt, Artificial Sequence
  Description of Artificial Sequence: Synthetic oligonucleotide
ugacacaguccuaaauguauu

SEQ ID NO: 6220 - RNA, 21 nt, Artificial Sequence
  Description of Artificial Sequence: Synthetic oligonucleotide
aguccuaaauguggccuuauu

SEQ ID NO: 6221 - RNA, 21 nt, Artificial Sequence
  Description of Artificial Sequence: Synthetic oligonucleotide
gaguguaacaucaagcacauu

SEQ ID NO: 6222 - RNA, 21 nt, Artificial Sequence
  Description of Artificial Sequence: Synthetic oligonucleotide
guguaacaucaagcaccgauu

SEQ ID NO: 6223 - RNA, 21 nt, Artificial Sequence
  Description of Artificial Sequence: Synthetic oligonucleotide
auuauaauccccaaccgaauu

SEQ ID NO: 6224 - RNA, 21 nt, Artificial Sequence
  Description of Artificial Sequence: Synthetic oligonucleotide
uauaauccccaaccgaguauu

SEQ ID NO: 6225 - RNA, 21 nt, Artificial Sequence
  Description of Artificial Sequence: Synthetic oligonucleotide
ucuugucagacauaaagcauu

SEQ ID NO: 6226 - RNA, 21 nt, Artificial Sequence
  Description of Artificial Sequence: Synthetic oligonucleotide
uugucagacauaaagccaauu

SEQ ID NO: 6227 - RNA, 21 nt, Artificial Sequence
  Description of Artificial Sequence: Synthetic oligonucleotide
acuucuugucagacauaaauu

SEQ ID NO: 6228 - RNA, 21 nt, Artificial Sequence
  Description of Artificial Sequence: Synthetic oligonucleotide
acuucuugucagacauaaauu

SEQ ID NO: 6229 - RNA, 21 nt, Artificial Sequence
  Description of Artificial Sequence: Synthetic oligonucleotide
acuucuugucagacauaaauu

SEQ ID NO: 6230 - RNA, 21 nt, Artificial Sequence
  Description of Artificial Sequence: Synthetic oligonucleotide
acuucuugucagacauaauuu

SEQ ID NO: 6231 - RNA, 21 nt, Artificial Sequence
  Description of Artificial Sequence: Synthetic oligonucleotide
acuucuugucagacauaaauu

SEQ ID NO: 6232 - RNA, 21 nt, Artificial Sequence
  Description of Artificial Sequence: Synthetic oligonucleotide
acuucuugucagacauaaauu

SEQ ID NO: 6233 - RNA, 21 nt, Artificial Sequence
  Description of Artificial Sequence: Synthetic oligonucleotide
acuucuugucagacauaaauu

SEQ ID NO: 6234 - RNA, 21 nt, Artificial Sequence
  Description of Artificial Sequence: Synthetic oligonucleotide
acuucuugucagacauaaauu

SEQ ID NO: 6235 - RNA, 21 nt, Artificial Sequence
  Description of Artificial Sequence: Synthetic oligonucleotide
ucuugucagacauaaagcauu

SEQ ID NO: 6236 - RNA, 21 nt, Artificial Sequence
  Description of Artificial Sequence: Synthetic oligonucleotide
ucuugucagacauaaagcauu

SEQ ID NO: 6237 - RNA, 21 nt, Artificial Sequence
  Description of Artificial Sequence: Synthetic oligonucleotide
ucuugucagacauaaagcauu

SEQ ID NO: 6238 - RNA, 21 nt, Artificial Sequence
  Description of Artificial Sequence: Synthetic oligonucleotide
ucuugucagacauaaagcauu

SEQ ID NO: 6239 - DNA, 21 bp, Artificial Sequence
  Description of Artificial Sequence: Synthetic oligonucleotide
  Description of Combined DNA/RNA Molecule: Synthetic oligonucleotide
uugucagacauaaagccaauu

SEQ ID NO: 6240 - DNA, 21 bp, Artificial Sequence
  Description of Artificial Sequence: Synthetic oligonucleotide
  Description of Combined DNA/RNA Molecule: Synthetic oligonucleotide
uugucagacauaaagccaauu

SEQ ID NO: 6241 - RNA, 21 nt, Artificial Sequence
  Description of Artificial Sequence: Synthetic oligonucleotide
uugucagacauaaagccaauu

SEQ ID NO: 6242 - RNA, 21 nt, Artificial Sequence
  Description of Artificial Sequence: Synthetic oligonucleotide
uugucagacauaaagccaauu

SEQ ID NO: 6243 - RNA, 21 nt, Artificial Sequence
  Description of Artificial Sequence: Synthetic oligonucleotide
uugucagacauaaagccaauu

SEQ ID NO: 6244 - RNA, 21 nt, Artificial Sequence
  Description of Artificial Sequence: Synthetic oligonucleotide
uugucagacauaaagccaauu

SEQ ID NO: 6245 - RNA, 21 nt, Artificial Sequence
  Description of Artificial Sequence: Synthetic oligonucleotide
uuuuaugucugacaagaaguu

SEQ ID NO: 6246 - RNA, 21 nt, Artificial Sequence
  Description of Artificial Sequence: Synthetic oligonucleotide
ugggugacauuaaacuuuuuu

SEQ ID NO: 6247 - RNA, 21 nt, Artificial Sequence
  Description of Artificial Sequence: Synthetic oligonucleotide
uuaugucugacaagaaguuuu

SEQ ID NO: 6248 - RNA, 21 nt, Artificial Sequence
  Description of Artificial Sequence: Synthetic oligonucleotide
uuuuaggacugugucauuauu

SEQ ID NO: 6249 - RNA, 21 nt, Artificial Sequence
  Description of Artificial Sequence: Synthetic oligonucleotide
uuuaggacugugucauuacuu

SEQ ID NO: 6250 - RNA, 21 nt, Artificial Sequence
  Description of Artificial Sequence: Synthetic oligonucleotide
uauaauuccuuccaggaccuu

SEQ ID NO: 6251 - RNA, 21 nt, Artificial Sequence
  Description of Artificial Sequence: Synthetic oligonucleotide
uauguuacacuccugguuguu

SEQ ID NO: 6252 - RNA, 21 nt, Artificial Sequence
  Description of Artificial Sequence: Synthetic oligonucleotide
ucaccacauaccauucagguu

SEQ ID NO: 6253 - RNA, 21 nt, Artificial Sequence
  Description of Artificial Sequence: Synthetic oligonucleotide
ugccacauuuaggacuguguu

SEQ ID NO: 6254 - RNA, 21 nt, Artificial Sequence
  Description of Artificial Sequence: Synthetic oligonucleotide
uaacgugaacugcggcuuguu

SEQ ID NO: 6255 - RNA, 21 nt, Artificial Sequence
  Description of Artificial Sequence: Synthetic oligonucleotide
ucagagacacgcgugaagauu

SEQ ID NO: 6256 - RNA, 21 nt, Artificial Sequence
  Description of Artificial Sequence: Synthetic oligonucleotide
ucaggauuccggcaauaguuu

SEQ ID NO: 6257 - RNA, 21 nt, Artificial Sequence
  Description of Artificial Sequence: Synthetic oligonucleotide
uagggcacaguagucgaauuu

SEQ ID NO: 6258 - RNA, 21 nt, Artificial Sequence
  Description of Artificial Sequence: Synthetic oligonucleotide
uugccacacuucucaaacuuu

SEQ ID NO: 6259 - RNA, 21 nt, Artificial Sequence
  Description of Artificial Sequence: Synthetic oligonucleotide
ucauuuaggacugugucauuu

SEQ ID NO: 6260 - RNA, 21 nt, Artificial Sequence
  Description of Artificial Sequence: Synthetic oligonucleotide
uucugacaagaaguuuuguuu

SEQ ID NO: 6261 - RNA, 21 nt, Artificial Sequence
  Description of Artificial Sequence: Synthetic oligonucleotide
uuuaugucugacaagaaguuu

SEQ ID NO: 6262 - RNA, 21 nt, Artificial Sequence
  Description of Artificial Sequence: Synthetic oligonucleotide
uauaauuccuuccaggaccuu

SEQ ID NO: 6263 - RNA, 21 nt, Artificial Sequence
  Description of Artificial Sequence: Synthetic oligonucleotide
uuaugucugacaagaaguuuu

SEQ ID NO: 6264 - RNA, 21 nt, Artificial Sequence
  Description of Artificial Sequence: Synthetic oligonucleotide
uuuuaugucugacaagaaguu

SEQ ID NO: 6265 - RNA, 21 nt, Artificial Sequence
  Description of Artificial Sequence: Synthetic oligonucleotide
uauguuacacuccugguuguu

SEQ ID NO: 6266 - RNA, 21 nt, Artificial Sequence
  Description of Artificial Sequence: Synthetic oligonucleotide
auuuaugucugacaagaaguu

SEQ ID NO: 6267 - RNA, 21 nt, Artificial Sequence
  Description of Artificial Sequence: Synthetic oligonucleotide
uuuuaugucugacaagaaguu

SEQ ID NO: 6268 - RNA, 21 nt, Artificial Sequence
  Description of Artificial Sequence: Synthetic oligonucleotide
uuuuaugucugacaagaaguu

SEQ ID NO: 6269 - RNA, 21 nt, Artificial Sequence
  Description of Artificial Sequence: Synthetic oligonucleotide
uuuuaugucugacaagaaguu

SEQ ID NO: 6270 - RNA, 21 nt, Artificial Sequence
  Description of Artificial Sequence: Synthetic oligonucleotide
cuuuaugucugacaagaaguu

SEQ ID NO: 6271 - RNA, 21 nt, Artificial Sequence
  Description of Artificial Sequence: Synthetic oligonucleotide
uauaauuccuuccaggaccuu

SEQ ID NO: 6272 - RNA, 21 nt, Artificial Sequence
  Description of Artificial Sequence: Synthetic oligonucleotide
uauaauuccuuccaggaccuu

SEQ ID NO: 6273 - RNA, 21 nt, Artificial Sequence
  Description of Artificial Sequence: Synthetic oligonucleotide
uauaauuccuuccaggaccuu

SEQ ID NO: 6274 - RNA, 21 nt, Artificial Sequence
  Description of Artificial Sequence: Synthetic oligonucleotide
uauaauuccuuccaggaccuu

SEQ ID NO: 6275 - RNA, 21 nt, Artificial Sequence
  Description of Artificial Sequence: Synthetic oligonucleotide
uauaauuccuuccaggaccuu

SEQ ID NO: 6276 - RNA, 21 nt, Artificial Sequence
  Description of Artificial Sequence: Synthetic oligonucleotide
aauaauuccuuccaggaccuu

SEQ ID NO: 6277 - RNA, 21 nt, Artificial Sequence
  Description of Artificial Sequence: Synthetic oligonucleotide
uauuccggcaauaguugucuu

SEQ ID NO: 6278 - RNA, 21 nt, Artificial Sequence
  Description of Artificial Sequence: Synthetic oligonucleotide
uacauuuaggacugugucauu

SEQ ID NO: 6279 - RNA, 21 nt, Artificial Sequence
  Description of Artificial Sequence: Synthetic oligonucleotide
uaaggccacauuuaggacuuu

SEQ ID NO: 6280 - RNA, 21 nt, Artificial Sequence
  Description of Artificial Sequence: Synthetic oligonucleotide
ugugcuugauguuacacucuu

SEQ ID NO: 6281 - RNA, 21 nt, Artificial Sequence
  Description of Artificial Sequence: Synthetic oligonucleotide
ucggugcuugauguuacacuu

SEQ ID NO: 6282 - RNA, 21 nt, Artificial Sequence
  Description of Artificial Sequence: Synthetic oligonucleotide
uucgguuggggauuauaauuu

SEQ ID NO: 6283 - RNA, 21 nt, Artificial Sequence
  Description of Artificial Sequence: Synthetic oligonucleotide
uacucgguuggggauuauauu

SEQ ID NO: 6284 - RNA, 21 nt, Artificial Sequence
  Description of Artificial Sequence: Synthetic oligonucleotide
ugcuuuaugucugacaagauu

SEQ ID NO: 6285 - RNA, 21 nt, Artificial Sequence
  Description of Artificial Sequence: Synthetic oligonucleotide
uuggcuuuaugucugacaauu

SEQ ID NO: 6286 - RNA, 21 nt, Artificial Sequence
  Description of Artificial Sequence: Synthetic oligonucleotide
uuuaugucugacaagaaguuu

SEQ ID NO: 6287 - RNA, 21 nt, Artificial Sequence
  Description of Artificial Sequence: Synthetic oligonucleotide
uuuaugucugacaagaaguuu

SEQ ID NO: 6288 - RNA, 21 nt, Artificial Sequence
  Description of Artificial Sequence: Synthetic oligonucleotide
uuuaugucugacaagaaguuu

SEQ ID NO: 6289 - RNA, 21 nt, Artificial Sequence
  Description of Artificial Sequence: Synthetic oligonucleotide
auuaugucugacaagaaguuu

SEQ ID NO: 6290 - RNA, 21 nt, Artificial Sequence
  Description of Artificial Sequence: Synthetic oligonucleotide
uuuaugucugacaagaaguuu

SEQ ID NO: 6291 - RNA, 21 nt, Artificial Sequence
  Description of Artificial Sequence: Synthetic oligonucleotide
uuuaugucugacaagaaguuu

SEQ ID NO: 6292 - RNA, 21 nt, Artificial Sequence
  Description of Artificial Sequence: Synthetic oligonucleotide
uuuaugucugacaagaaguuu

SEQ ID NO: 6293 - RNA, 21 nt, Artificial Sequence
  Description of Artificial Sequence: Synthetic oligonucleotide
uuuaugucugacaagaaguuu

SEQ ID NO: 6294 - RNA, 21 nt, Artificial Sequence
  Description of Artificial Sequence: Synthetic oligonucleotide
ugcuuuaugucugacaagauu

SEQ ID NO: 6295 - RNA, 21 nt, Artificial Sequence
  Description of Artificial Sequence: Synthetic oligonucleotide
ugcuuuaugucugacaagauu

SEQ ID NO: 6296 - RNA, 21 nt, Artificial Sequence
  Description of Artificial Sequence: Synthetic oligonucleotide
ugcuuuaugucugacaagauu

SEQ ID NO: 6297 - RNA, 21 nt, Artificial Sequence
  Description of Artificial Sequence: Synthetic oligonucleotide
ugcuuuaugucugacaagauu

SEQ ID NO: 6298 - RNA, 21 nt, Artificial Sequence
  Description of Artificial Sequence: Synthetic oligonucleotide
uuggcuuuaugucugacaauu

SEQ ID NO: 6299 - RNA, 21 nt, Artificial Sequence
  Description of Artificial Sequence: Synthetic oligonucleotide
uuggcuuuaugucugacaauu

SEQ ID NO: 6300 - RNA, 21 nt, Artificial Sequence
  Description of Artificial Sequence: Synthetic oligonucleotide
uuggcuuuaugucugacaauu

SEQ ID NO: 6301 - RNA, 21 nt, Artificial Sequence
  Description of Artificial Sequence: Synthetic oligonucleotide
uuggcuuuaugucugacaauu

SEQ ID NO: 6302 - RNA, 21 nt, Artificial Sequence
  Description of Artificial Sequence: Synthetic oligonucleotide
uuggcuuuaugucugacaauu

SEQ ID NO: 6303 - RNA, 21 nt, Artificial Sequence
  Description of Artificial Sequence: Synthetic oligonucleotide
uuggcuuuaugucugacaauu

SEQ ID NO: 6304-6316 - skipped (13 entries)

SEQ ID NO: 6317 - RNA, 21 nt, Artificial Sequence
  Description of Artificial Sequence: Synthetic oligonucleotide
ccugcauuauggacaaugauu

SEQ ID NO: 6318 - RNA, 21 nt, Artificial Sequence
  Description of Artificial Sequence: Synthetic oligonucleotide
ucauuguccauaaugcagguu

SEQ ID NO: 6319 - RNA, 21 nt, Artificial Sequence
  Description of Artificial Sequence: Synthetic oligonucleotide
  5' Phosphorothioate linkage
  modified_base (1)..(1): 2' O-methyl modified a, c, u, g, or other
  modified_base (2)..(2): 2' O-methyl modified a, c, u, g, or other
  modified_base (3)..(3): 2' O-methyl modified a, c, u, g, or other
  modified_base (4)..(4): 2' O-methyl modified a, c, u, g, or other
  modified_base (5)..(5): 2' fluoro-modified a, c, u, g, or other
  modified_base (6)..(6): 2' O-methyl modified a, c, u, g, or other
  modified_base (7)..(7): 2' O-methyl modified a, c, u, g, or other
  modified_base (8)..(8): 2' O-methyl modified a, c, u, g, or other
  modified_base (9)..(9): 2' fluoro-modified a, c, u, g, or other
  modified_base (10)..(10): 2' O-methyl modified a, c, u, g, or other
  modified_base (11)..(11): 2' fluoro-modified a, c, u, g, or other
  modified_base (12)..(12): 2' O-methyl modified a, c, u, g, or other
  modified_base (13)..(13): 2' O-methyl modified a, c, u, g, or other
  modified_base (14)..(14): 2' O-methyl modified a, c, u, g, or other
  modified_base (15)..(15): 2' O-methyl modified a, c, u, g, or other
  modified_base (16)..(16): 2' O-methyl modified a, c, u, g, or other
  modified_base (17)..(17): 2' O-methyl modified a, c, u, g, or other
  modified_base (18)..(18): 2' O-methyl modified a, c, u, g, or other
  modified_base (19)..(19): 2' O-methyl modified a, c, u, g, or other
  misc_feature (19)..(20): Phosphorothioate linkage
  modified_base (20)..(20): 2' O-methyl modified a, c, u, g, or other
  misc_feature (20)..(21): Phosphorothioate linkage
  modified_base (21)..(21): 2' O-methyl modified a, c, u, g, or other
nnnnnnnnnnnnnnnnnnnnn

SEQ ID NO: 6320 - RNA, 21 nt, Artificial Sequence
  Description of Artificial Sequence: Synthetic oligonucleotide
  5' Phosphorothioate linkage
  modified_base (1)..(1): 2' O-methyl modified a, c, u, g, or other
  modified_base (2)..(2): 2' O-methyl modified a, c, u, g, or other
  modified_base (3)..(3): 2' O-methyl modified a, c, u, g, or other
  modified_base (4)..(4): 2' O-methyl modified a, c, u, g, or other
  modified_base (5)..(5): 2' fluoro-modified a, c, u, g, or other
  modified_base (6)..(6): 2' O-methyl modified a, c, u, g, or other
  modified_base (7)..(7): 2' O-methyl modified a, c, u, g, or other
  modified_base (8)..(8): 2' O-methyl modified a, c, u, g, or other
  modified_base (9)..(9): 2' fluoro-modified a, c, u, g, or other
  modified_base (10)..(10): 2' fluoro-modified a, c, u, g, or other
  modified_base (11)..(11): 2' O-methyl modified a, c, u, g, or other
  modified_base (12)..(12): 2' O-methyl modified a, c, u, g, or other
  modified_base (13)..(13): 2' O-methyl modified a, c, u, g, or other
  modified_base (14)..(14): 2' O-methyl modified a, c, u, g, or other
  modified_base (15)..(15): 2' O-methyl modified a, c, u, g, or other
  modified_base (16)..(16): 2' O-methyl modified a, c, u, g, or other
  modified_base (17)..(17): 2' O-methyl modified a, c, u, g, or other
  modified_base (18)..(18): 2' O-methyl modified a, c, u, g, or other
  modified_base (19)..(19): 2' O-methyl modified a, c, u, g, or other
  misc_feature (19)..(20): Phosphorothioate linkage
  modified_base (20)..(20): 2' O-methyl modified a, c, u, g, or other
  misc_feature (20)..(21): Phosphorothioate linkage
  modified_base (21)..(21): 2' O-methyl modified a, c, u, g, or other
nnnnnnnnnnnnnnnnnnnnn

SEQ ID NO: 6321 - DNA, 21 bp, Artificial Sequence
  Description of Artificial Sequence: Synthetic oligonucleotide
  Description of Combined DNA/RNA Molecule: Synthetic oligonucleotide
  5' Phosphorothioate linkage
  modified_base (1)..(1): 2' fluoro-modified a, c, u, g, or other
  modified_base (2)..(2): 2' O-methyl modified a, c, u, g, or other
  modified_base (3)..(3): 2' fluoro-modified a, c, u, g, or other
  modified_base (4)..(4): 2' O-methyl modified a, c, u, g, or other
  modified_base (5)..(5): 2' fluoro-modified a, c, u, g, or other
  modified_base (6)..(6): 2' O-methyl modified a, c, u, g, or other
  modified_base (7)..(7): 2' fluoro-modified a, c, u, g, or other
  modified_base (8)..(8): 2' O-methyl modified a, c, u, g, or other
  modified_base (9)..(9): 2' deoxy-modified a, c, u, g, or other
  modified_base (10)..(10): 2' O-methyl modified a, c, u, g, or other
  modified_base (11)..(11): 2' fluoro-modified a, c, u, g, or other
  modified_base (12)..(12): 2' O-methyl modified a, c, u, g, or other
  modified_base (13)..(13): 2' O-methyl modified a, c, u, g, or other
  modified_base (14)..(14): 2' O-methyl modified a, c, u, g, or other
  modified_base (15)..(15): 2' fluoro-modified a, c, u, g, or other
  modified_base (16)..(16): 2' O-methyl modified a, c, u, g, or other
  modified_base (17)..(17): 2' fluoro-modified a, c, u, g, or other
  modified_base (18)..(18): 2' O-methyl modified a, c, u, g, or other
  modified_base (19)..(19): 2' O-methyl modified a, c, u, g, or other
  misc_feature (19)..(20): Phosphorothioate linkage
  modified_base (20)..(20): 2' O-methyl modified a, c, u, g, or other
  misc_feature (20)..(21): Phosphorothioate linkage
  modified_base (21)..(21): 2' O-methyl modified a, c, u, g, or other
nnnnnnnnnnnnnnnnnnnnn

SEQ ID NO: 6322 - DNA, 21 bp, Artificial Sequence
  Description of Artificial Sequence: Synthetic oligonucleotide
  Description of Combined DNA/RNA Molecule: Synthetic oligonucleotide
  5' Phosphorothioate linkage
  modified_base (1)..(1): 2' fluoro-modified a, c, u, g, or other
  modified_base (2)..(2): 2' O-methyl modified a, c, u, g, or other
  modified_base (3)..(3): 2' fluoro-modified a, c, u, g, or other
  modified_base (4)..(4): 2' O-methyl modified a, c, u, g, or other
  modified_base (5)..(5): 2' fluoro-modified a, c, u, g, or other
  modified_base (6)..(6): 2' O-methyl modified a, c, u, g, or other
  modified_base (7)..(7): 2' fluoro-modified a, c, u, g, or other
  modified_base (8)..(8): 2' O-methyl modified a, c, u, g, or other
  modified_base (9)..(9): 2' deoxy-modified a, c, u, g, or other
  modified_base (10)..(10): 2' O-methyl modified a, c, u, g, or other
  modified_base (11)..(11): 2' O-methyl modified a, c, u, g, or other
  modified_base (12)..(12): 2' O-methyl modified a, c, u, g, or other
  modified_base (13)..(13): 2' fluoro-modified a, c, u, g, or other
  modified_base (14)..(14): 2' O-methyl modified a, c, u, g, or other
  modified_base (15)..(15): 2' fluoro-modified a, c, u, g, or other
  modified_base (16)..(16): 2' O-methyl modified a, c, u, g, or other
  modified_base (17)..(17): 2' O-methyl modified a, c, u, g, or other
  modified_base (18)..(18): 2' O-methyl modified a, c, u, g, or other
  modified_base (19)..(19): 2' O-methyl modified a, c, u, g, or other
  misc_feature (19)..(20): Phosphorothioate linkage
  modified_base (20)..(20): 2' O-methyl modified a, c, u, g, or other
  misc_feature (20)..(21): Phosphorothioate linkage
  modified_base (21)..(21): 2' O-methyl modified a, c, u, g, or other
nnnnnnnnnnnnnnnnnnnnn

SEQ ID NO: 6323 - RNA, 21 nt, Artificial Sequence
  Description of Artificial Sequence: Synthetic oligonucleotide
  5' Phosphorothioate linkage
  modified_base (1)..(1): 2' O-methyl modified a, c, u, g, or other
  modified_base (2)..(2): 2' O-methyl modified a, c, u, g, or other
  modified_base (3)..(3): 2' O-methyl modified a, c, u, g, or other
  modified_base (4)..(4): 2' O-methyl modified a, c, u, g, or other
  modified_base (5)..(5): 2' fluoro-modified a, c, u, g, or other
  modified_base (6)..(6): 2' fluoro-modified a, c, u, g, or other
  modified_base (7)..(7): 2' O-methyl modified a, c, u, g, or other
  modified_base (8)..(8): 2' fluoro-modified a, c, u, g, or other
  modified_base (9)..(9): 2' fluoro-modified a, c, u, g, or other
  modified_base (10)..(10): 2' O-methyl modified a, c, u, g, or other
  modified_base (11)..(11): 2' fluoro-modified a, c, u, g, or other
  modified_base (12)..(12): 2' O-methyl modified a, c, u, g, or other
  modified_base (13)..(13): 2' O-methyl modified a, c, u, g, or other
  modified_base (14)..(14): 2' O-methyl modified a, c, u, g, or other
  modified_base (15)..(15): 2' O-methyl modified a, c, u, g, or other
  modified_base (16)..(16): 2' O-methyl modified a, c, u, g, or other
  modified_base (17)..(17): 2' O-methyl modified a, c, u, g, or other
  modified_base (18)..(18): 2' O-methyl modified a, c, u, g, or other
  modified_base (19)..(19): 2' O-methyl modified a, c, u, g, or other
  misc_feature (19)..(20): Phosphorothioate linkage
  modified_base (20)..(20): 2' O-methyl modified a, c, u, g, or other
  misc_feature (20)..(21): Phosphorothioate linkage
  modified_base (21)..(21): 2' O-methyl modified a, c, u, g, or other
nnnnnnnnnnnnnnnnnnnnn

SEQ ID NO: 6324 - RNA, 21 nt, Artificial Sequence
  Description of Artificial Sequence: Synthetic oligonucleotide
  5' Phosphorothioate linkage
  modified_base (1)..(1): 2' O-methyl modified a, c, u, g, or other
  modified_base (2)..(2): 2' O-methyl modified a, c, u, g, or other
  modified_base (3)..(3): 2' O-methyl modified a, c, u, g, or other
  modified_base (4)..(4): 2' O-methyl modified a, c, u, g, or other
  modified_base (5)..(5): 2' O-methyl modified a, c, u, g, or other
  modified_base (6)..(6): 2' fluoro-modified a, c, u, g, or other
  modified_base (7)..(7): 2' fluoro-modified a, c, u, g, or other
  modified_base (8)..(8): 2' fluoro-modified a, c, u, g, or other
  modified_base (9)..(9): 2' fluoro-modified a, c, u, g, or other
  modified_base (10)..(10): 2' O-methyl modified a, c, u, g, or other
  modified_base (11)..(11): 2' O-methyl modified a, c, u, g, or other
  modified_base (12)..(12): 2' O-methyl modified a, c, u, g, or other
  modified_base (13)..(13): 2' O-methyl modified a, c, u, g, or other
  modified_base (14)..(14): 2' O-methyl modified a, c, u, g, or other
  modified_base (15)..(15): 2' O-methyl modified a, c, u, g, or other
  modified_base (16)..(16): 2' O-methyl modified a, c, u, g, or other
  modified_base (17)..(17): 2' O-methyl modified a, c, u, g, or other
  modified_base (18)..(18): 2' O-methyl modified a, c, u, g, or other
  modified_base (19)..(19): 2' O-methyl modified a, c, u, g, or other
  misc_feature (19)..(20): Phosphorothioate linkage
  modified_base (20)..(20): 2' O-methyl modified a, c, u, g, or other
  misc_feature (20)..(21): Phosphorothioate linkage
  modified_base (21)..(21): 2' O-methyl modified a, c, u, g, or other
nnnnnnnnnnnnnnnnnnnnn

SEQ ID NO: 6325 - RNA, 21 nt, Artificial Sequence
  Description of Artificial Sequence: Synthetic oligonucleotide
  5' Phosphorothioate linkage
  modified_base (1)..(1): 2' O-methyl modified a, c, u, g, or other
  modified_base (2)..(2): 2' O-methyl modified a, c, u, g, or other
  modified_base (3)..(3): 2' O-methyl modified a, c, u, g, or other
  modified_base (4)..(4): 2' O-methyl modified a, c, u, g, or other
  modified_base (5)..(5): 2' fluoro-modified a, c, u, g, or other
  modified_base (6)..(6): 2' O-methyl modified a, c, u, g, or other
  modified_base (7)..(7): 2' fluoro-modified a, c, u, g, or other
  modified_base (8)..(8): 2' O-methyl modified a, c, u, g, or other
  modified_base (9)..(9): 2' fluoro-modified a, c, u, g, or other
  modified_base (10)..(10): 2' O-methyl modified a, c, u, g, or other
  modified_base (11)..(11): 2' O-methyl modified a, c, u, g, or other
  modified_base (12)..(12): 2' O-methyl modified a, c, u, g, or other
  modified_base (13)..(13): 2' O-methyl modified a, c, u, g, or other
  modified_base (14)..(14): 2' O-methyl modified a, c, u, g, or other
  modified_base (15)..(15): 2' O-methyl modified a, c, u, g, or other
  modified_base (16)..(16): 2' O-methyl modified a, c, u, g, or other
  modified_base (17)..(17): 2' O-methyl modified a, c, u, g, or other
  modified_base (18)..(18): 2' O-methyl modified a, c, u, g, or other
  modified_base (19)..(19): 2' O-methyl modified a, c, u, g, or other
  misc_feature (19)..(20): Phosphorothioate linkage
  modified_base (20)..(20): 2' O-methyl modified a, c, u, g, or other
  misc_feature (20)..(21): Phosphorothioate linkage
  modified_base (21)..(21): 2' O-methyl modified a, c, u, g, or other
nnnnnnnnnnnnnnnnnnnnn

SEQ ID NO: 6326 - RNA, 21 nt, Artificial Sequence
  Description of Artificial Sequence: Synthetic oligonucleotide
  modified_base (1)..(1): 2' O-methyl modified a, c, u, g, or other
  misc_feature (1)..(2): Phosphorothioate linkage
  modified_base (2)..(2): 2' O-methyl modified a, c, u, g, or other
  misc_feature (2)..(3): Phosphorothioate linkage
  modified_base (3)..(3): 2' O-methyl modified a, c, u, g, or other
  modified_base (4)..(4): 2' O-methyl modified a, c, u, g, or other
  modified_base (5)..(5): 2' fluoro-modified a, c, u, g, or other
  modified_base (6)..(6): 2' fluoro-modified a, c, u, g, or other
  modified_base (7)..(7): 2' O-methyl modified a, c, u, g, or other
  modified_base (8)..(8): 2' fluoro-modified a, c, u, g, or other
  modified_base (9)..(9): 2' fluoro-modified a, c, u, g, or other
  modified_base (10)..(10): 2' O-methyl modified a, c, u, g, or other
  modified_base (11)..(11): 2' O-methyl modified a, c, u, g, or other
  modified_base (12)..(12): 2' O-methyl modified a, c, u, g, or other
  modified_base (13)..(13): 2' O-methyl modified a, c, u, g, or other
  modified_base (14)..(14): 2' O-methyl modified a, c, u, g, or other
  modified_base (15)..(15): 2' O-methyl modified a, c, u, g, or other
  modified_base (16)..(16): 2' O-methyl modified a, c, u, g, or other
  modified_base (17)..(17): 2' O-methyl modified a, c, u, g, or other
  modified_base (18)..(18): 2' O-methyl modified a, c, u, g, or other
  modified_base (19)..(19): 2' O-methyl modified a, c, u, g, or other
  misc_feature (19)..(20): Phosphorothioate linkage
  modified_base (20)..(20): 2' O-methyl modified a, c, u, g, or other
  misc_feature (20)..(21): Phosphorothioate linkage
  modified_base (21)..(21): 2' O-methyl modified a, c, u, g, or other
nnnnnnnnnnnnnnnnnnnnn

SEQ ID NO: 6327 - DNA, 21 bp, Artificial Sequence
  Description of Artificial Sequence: Synthetic oligonucleotide
  Description of Combined DNA/RNA Molecule: Synthetic oligonucleotide
  modified_base (1)..(1): 2' fluoro-modified a, c, u, g, or other
  misc_feature (1)..(2): Phosphorothioate linkage
  modified_base (2)..(2): 2' O-methyl modified a, c, u, g, or other
  misc_feature (2)..(3): Phosphorothioate linkage
  modified_base (3)..(3): 2' fluoro-modified a, c, u, g, or other
  modified_base (4)..(4): 2' O-methyl modified a, c, u, g, or other
  modified_base (5)..(5): 2' fluoro-modified a, c, u, g, or other
  modified_base (6)..(6): 2' O-methyl modified a, c, u, g, or other
  modified_base (7)..(7): 2' fluoro-modified a, c, u, g, or other
  modified_base (8)..(8): 2' O-methyl modified a, c, u, g, or other
  modified_base (9)..(9): 2' deoxy-modified a, c, u, g, or other
  modified_base (10)..(10): 2' O-methyl modified a, c, u, g, or other
  modified_base (11)..(11): 2' fluoro-modified a, c, u, g, or other
  modified_base (12)..(12): 2' O-methyl modified a, c, u, g, or other
  modified_base (13)..(13): 2' O-methyl modified a, c, u, g, or other
  modified_base (14)..(14): 2' O-methyl modified a, c, u, g, or other
  modified_base (15)..(15): 2' fluoro-modified a, c, u, g, or other
  modified_base (16)..(16): 2' O-methyl modified a, c, u, g, or other
  modified_base (17)..(17): 2' fluoro-modified a, c, u, g, or other
  modified_base (18)..(18): 2' O-methyl modified a, c, u, g, or other
  modified_base (19)..(19): 2' O-methyl modified a, c, u, g, or other
  misc_feature (19)..(20): Phosphorothioate linkage
  modified_base (20)..(20): 2' O-methyl modified a, c, u, g, or other
  misc_feature (20)..(21): Phosphorothioate linkage
  modified_base (21)..(21): 2' O-methyl modified a, c, u, g, or other
nnnnnnnnnnnnnnnnnnnnn

SEQ ID NO: 6328 - RNA, 21 nt, Artificial Sequence
  Description of Artificial Sequence: Synthetic oligonucleotide
  modified_base (1)..(1): 2' O-methyl modified a, c, u, g, or other
  misc_feature (1)..(2): Phosphorothioate linkage
  modified_base (2)..(2): 2' O-methyl modified a, c, u, g, or other
  misc_feature (2)..(3): Phosphorothioate linkage
  modified_base (3)..(3): 2' O-methyl modified a, c, u, g, or other
  modified_base (4)..(4): 2' O-methyl modified a, c, u, g, or other
  modified_base (5)..(5): 2' O-methyl modified a, c, u, g, or other
  modified_base (6)..(6): 2' O-methyl modified a, c, u, g, or other
  modified_base (7)..(7): 2' fluoro-modified a, c, u, g, or other
  modified_base (8)..(8): 2' fluoro-modified a, c, u, g, or other
  modified_base (9)..(9): 2' fluoro-modified a, c, u, g, or other
  modified_base (10)..(10): 2' fluoro-modified a, c, u, g, or other
  modified_base (11)..(11): 2' fluoro-modified a, c, u, g, or other
  modified_base (12)..(12): 2' O-methyl modified a, c, u, g, or other
  modified_base (13)..(13): 2' O-methyl modified a, c, u, g, or other
  modified_base (14)..(14): 2' O-methyl modified a, c, u, g, or other
  modified_base (15)..(15): 2' O-methyl modified a, c, u, g, or other
  modified_base (16)..(16): 2' O-methyl modified a, c, u, g, or other
  modified_base (17)..(17): 2' O-methyl modified a, c, u, g, or other
  modified_base (18)..(18): 2' O-methyl modified a, c, u, g, or other
  modified_base (19)..(19): 2' O-methyl modified a, c, u, g, or other
  misc_feature (19)..(20): Phosphorothioate linkage
  modified_base (20)..(20): 2' O-methyl modified a, c, u, g, or other
  misc_feature (20)..(21): Phosphorothioate linkage
  modified_base (21)..(21): 2' O-methyl modified a, c, u, g, or other
nnnnnnnnnnnnnnnnnnnnn

SEQ ID NO: 6329 - RNA, 21 nt, Artificial Sequence
  Description of Artificial Sequence: Synthetic oligonucleotide
  modified_base (1)..(1): 2' O-methyl modified a, c, u, g, or other
  misc_feature (1)..(2): Phosphorothioate linkage
  modified_base (2)..(2): 2' O-methyl modified a, c, u, g, or other
  misc_feature (2)..(3): Phosphorothioate linkage
  modified_base (3)..(3): 2' O-methyl modified a, c, u, g, or other
  modified_base (4)..(4): 2' O-methyl modified a, c, u, g, or other
  modified_base (5)..(5): 2' O-methyl modified a, c, u, g, or other
  modified_base (6)..(6): 2' fluoro-modified a, c, u, g, or other
  modified_base (7)..(7): 2' fluoro-modified a, c, u, g, or other
  modified_base (8)..(8): 2' fluoro-modified a, c, u, g, or other
  modified_base (9)..(9): 2' fluoro-modified a, c, u, g, or other
  modified_base (10)..(10): 2' fluoro-modified a, c, u, g, or other
  modified_base (11)..(11): 2' O-methyl modified a, c, u, g, or other
  modified_base (12)..(12): 2' O-methyl modified a, c, u, g, or other
  modified_base (13)..(13): 2' O-methyl modified a, c, u, g, or other
  modified_base (14)..(14): 2' O-methyl modified a, c, u, g, or other
  modified_base (15)..(15): 2' O-methyl modified a, c, u, g, or other
  modified_base (16)..(16): 2' O-methyl modified a, c, u, g, or other
  modified_base (17)..(17): 2' O-methyl modified a, c, u, g, or other
  modified_base (18)..(18): 2' O-methyl modified a, c, u, g, or other
  modified_base (19)..(19): 2' O-methyl modified a, c, u, g, or other
  misc_feature (19)..(20): Phosphorothioate linkage
  modified_base (20)..(20): 2' O-methyl modified a, c, u, g, or other
  misc_feature (20)..(21): Phosphorothioate linkage
  modified_base (21)..(21): 2' O-methyl modified a, c, u, g, or other
nnnnnnnnnnnnnnnnnnnnn

SEQ ID NO: 6330 - RNA, 21 nt, Artificial Sequence
  Description of Artificial Sequence: Synthetic oligonucleotide
  5' Phosphorothioate linkage
  modified_base (1)..(1): 2' O-methyl modified a, c, u, g, or other
  modified_base (2)..(2): 2' O-methyl modified a, c, u, g, or other
  modified_base (3)..(3): 2' O-methyl modified a, c, u, g, or other
  modified_base (4)..(4): 2' O-methyl modified a, c, u, g, or other
  modified_base (5)..(5): 2' O-methyl modified a, c, u, g, or other
  modified_base (6)..(6): 2' fluoro-modified a, c, u, g, or other
  modified_base (7)..(7): 2' O-methyl modified a, c, u, g, or other
  modified_base (8)..(8): 2' fluoro-modified a, c, u, g, or other
  modified_base (9)..(9): 2' fluoro-modified a, c, u, g, or other
  modified_base (10)..(10): 2' O-methyl modified a, c, u, g, or other
  modified_base (11)..(11): 2' O-methyl modified a, c, u, g, or other
  modified_base (12)..(12): 2' O-methyl modified a, c, u, g, or other
  modified_base (13)..(13): 2' O-methyl modified a, c, u, g, or other
  modified_base (14)..(14): 2' O-methyl modified a, c, u, g, or other
  modified_base (15)..(15): 2' O-methyl modified a, c, u, g, or other
  modified_base (16)..(16): 2' O-methyl modified a, c, u, g, or other
  modified_base (17)..(17): 2' O-methyl modified a, c, u, g, or other
  modified_base (18)..(18): 2' O-methyl modified a, c, u, g, or other
  modified_base (19)..(19): 2' O-methyl modified a, c, u, g, or other
  misc_feature (19)..(20): Phosphorothioate linkage
  modified_base (20)..(20): 2' O-methyl modified a, c, u, g, or other
  misc_feature (20)..(21): Phosphorothioate linkage
  modified_base (21)..(21): 2' O-methyl modified a, c, u, g, or other
nnnnnnnnnnnnnnnnnnnnn

SEQ ID NO: 6331 - RNA, 21 nt, Artificial Sequence
  Description of Artificial Sequence: Synthetic oligonucleotide
  5' Phosphorothioate linkage
  modified_base (1)..(1): 2' O-methyl modified a, c, u, g, or other
  modified_base (2)..(2): 2' O-methyl modified a, c, u, g, or other
  modified_base (3)..(3): 2' O-methyl modified a, c, u, g, or other
  modified_base (4)..(4): 2' O-methyl modified a, c, u, g, or other
  modified_base (5)..(5): 2' O-methyl modified a, c, u, g, or other
  modified_base (6)..(6): 2' O-methyl modified a, c, u, g, or other
  modified_base (7)..(7): 2' fluoro-modified a, c, u, g, or other
  modified_base (8)..(8): 2' fluoro-modified a, c, u, g, or other
  modified_base (9)..(9): 2' fluoro-modified a, c, u, g, or other
  modified_base (10)..(10): 2' fluoro-modified a, c, u, g, or other
  modified_base (11)..(11): 2' fluoro-modified a, c, u, g, or other
  modified_base (12)..(12): 2' O-methyl modified a, c, u, g, or other
  modified_base (13)..(13): 2' O-methyl modified a, c, u, g, or other
  modified_base (14)..(14): 2' O-methyl modified a, c, u, g, or other
  modified_base (15)..(15): 2' O-methyl modified a, c, u, g, or other
  modified_base (16)..(16): 2' O-methyl modified a, c, u, g, or other
  modified_base (17)..(17): 2' O-methyl modified a, c, u, g, or other
  modified_base (18)..(18): 2' O-methyl modified a, c, u, g, or other
  modified_base (19)..(19): 2' O-methyl modified a, c, u, g, or other
  misc_feature (19)..(20): Phosphorothioate linkage
  modified_base (20)..(20): 2' O-methyl modified a, c, u, g, or other
  misc_feature (20)..(21): Phosphorothioate linkage
  modified_base (21)..(21): 2' O-methyl modified a, c, u, g, or other
nnnnnnnnnnnnnnnnnnnnn

SEQ ID NO: 6332 - RNA, 21 nt, Artificial Sequence
  Description of Artificial Sequence: Synthetic oligonucleotide
  5' Phosphorothioate linkage
  modified_base (1)..(1): 2' O-methyl modified a, c, u, g, or other
  modified_base (2)..(2): 2' O-methyl modified a, c, u, g, or other
  modified_base (3)..(3): 2' O-methyl modified a, c, u, g, or other
  modified_base (4)..(4): 2' O-methyl modified a, c, u, g, or other
  modified_base (5)..(5): 2' fluoro-modified a, c, u, g, or other
  modified_base (6)..(6): 2' fluoro-modified a, c, u, g, or other
  modified_base (7)..(7): 2' O-methyl modified a, c, u, g, or other
  modified_base (8)..(8): 2' O-methyl modified a, c, u, g, or other
  modified_base (9)..(9): 2' fluoro-modified a, c, u, g, or other
  modified_base (10)..(10): 2' O-methyl modified a, c, u, g, or other
  modified_base (11)..(11): 2' O-methyl modified a, c, u, g, or other
  modified_base (12)..(12): 2' O-methyl modified a, c, u, g, or other
  modified_base (13)..(13): 2' O-methyl modified a, c, u, g, or other
  modified_base (14)..(14): 2' O-methyl modified a, c, u, g, or other
  modified_base (15)..(15): 2' O-methyl modified a, c, u, g, or other
  modified_base (16)..(16): 2' O-methyl modified a, c, u, g, or other
  modified_base (17)..(17): 2' O-methyl modified a, c, u, g, or other
  modified_base (18)..(18): 2' O-methyl modified a, c, u, g, or other
  modified_base (19)..(19): 2' O-methyl modified a, c, u, g, or other
  misc_feature (19)..(20): Phosphorothioate linkage
  modified_base (20)..(20): 2' O-methyl modified a, c, u, g, or other
  misc_feature (20)..(21): Phosphorothioate linkage
  modified_base (21)..(21): 2' O-methyl modified a, c, u, g, or other
nnnnnnnnnnnnnnnnnnnnn

SEQ ID NO: 6333 - RNA, 21 nt, Artificial Sequence
  Description of Artificial Sequence: Synthetic oligonucleotide
  5' Phosphorothioate linkage
  modified_base (1)..(1): 2' O-methyl modified a, c, u, g, or other
  modified_base (2)..(2): 2' O-methyl modified a, c, u, g, or other
  modified_base (3)..(3): 2' O-methyl modified a, c, u, g, or other
  modified_base (4)..(4): 2' O-methyl modified a, c, u, g, or other
  modified_base (5)..(5): 2' fluoro-modified a, c, u, g, or other
  modified_base (6)..(6): 2' fluoro-modified a, c, u, g, or other
  modified_base (7)..(7): 2' O-methyl modified a, c, u, g, or other
  modified_base (8)..(8): 2' fluoro-modified a, c, u, g, or other
  modified_base (9)..(9): 2' fluoro-modified a, c, u, g, or other
  modified_base (10)..(10): 2' O-methyl modified a, c, u, g, or other
  modified_base (11)..(11): 2' O-methyl modified a, c, u, g, or other
  modified_base (12)..(12): 2' O-methyl modified a, c, u, g, or other
  modified_base (13)..(13): 2' O-methyl modified a, c, u, g, or other
  modified_base (14)..(14): 2' O-methyl modified a, c, u, g, or other
  modified_base (15)..(15): 2' O-methyl modified a, c, u, g, or other
  modified_base (16)..(16): 2' O-methyl modified a, c, u, g, or other
  modified_base (17)..(17): 2' O-methyl modified a, c, u, g, or other
  modified_base (18)..(18): 2' O-methyl modified a, c, u, g, or other
  modified_base (19)..(19): 2' O-methyl modified a, c, u, g, or other
  misc_feature (19)..(20): Phosphorothioate linkage
  modified_base (20)..(20): 2' O-methyl modified a, c, u, g, or other
  misc_feature (20)..(21): Phosphorothioate linkage
  modified_base (21)..(21): 2' O-methyl modified a, c, u, g, or other
nnnnnnnnnnnnnnnnnnnnn

SEQ ID NO: 6334 - RNA, 21 nt, Artificial Sequence
  Description of Artificial Sequence: Synthetic oligonucleotide
  5' Phosphorothioate linkage
  modified_base (1)..(1): 2' O-methyl modified a, c, u, g, or other
  modified_base (2)..(2): 2' O-methyl modified a, c, u, g, or other
  modified_base (3)..(3): 2' O-methyl modified a, c, u, g, or other
  modified_base (4)..(4): 2' O-methyl modified a, c, u, g, or other
  modified_base (5)..(5): 2' O-methyl modified a, c, u, g, or other
  modified_base (6)..(6): 2' fluoro-modified a, c, u, g, or other
  modified_base (7)..(7): 2' fluoro-modified a, c, u, g, or other
  modified_base (8)..(8): 2' O-methyl modified a, c, u, g, or other
  modified_base (9)..(9): 2' fluoro-modified a, c, u, g, or other
  modified_base (10)..(10): 2' fluoro-modified a, c, u, g, or other
  modified_base (11)..(11): 2' O-methyl modified a, c, u, g, or other
  modified_base (12)..(12): 2' O-methyl modified a, c, u, g, or other
  modified_base (13)..(13): 2' O-methyl modified a, c, u, g, or other
  modified_base (14)..(14): 2' O-methyl modified a, c, u, g, or other
  modified_base (15)..(15): 2' O-methyl modified a, c, u, g, or other
  modified_base (16)..(16): 2' O-methyl modified a, c, u, g, or other
  modified_base (17)..(17): 2' O-methyl modified a, c, u, g, or other
  modified_base (18)..(18): 2' O-methyl modified a, c, u, g, or other
  modified_base (19)..(19): 2' O-methyl modified a, c, u, g, or other
  misc_feature (19)..(20): Phosphorothioate linkage
  modified_base (20)..(20): 2' O-methyl modified a, c, u, g, or other
  misc_feature (20)..(21): Phosphorothioate linkage
  modified_base (21)..(21): 2' O-methyl modified a, c, u, g, or other
nnnnnnnnnnnnnnnnnnnnn

SEQ ID NO: 6335 - RNA, 21 nt, Artificial Sequence
  Description of Artificial Sequence: Synthetic oligonucleotide
  5' Phosphorothioate linkage
  modified_base (1)..(1): 2' O-methyl modified a, c, u, g, or other
  modified_base (2)..(2): 2' O-methyl modified a, c, u, g, or other
  modified_base (3)..(3): 2' O-methyl modified a, c, u, g, or other
  modified_base (4)..(4): 2' O-methyl modified a, c, u, g, or other
  modified_base (5)..(5): 2' O-methyl modified a, c, u, g, or other
  modified_base (6)..(6): 2' O-methyl modified a, c, u, g, or other
  modified_base (7)..(7): 2' fluoro-modified a, c, u, g, or other
  modified_base (8)..(8): 2' O-methyl modified a, c, u, g, or other
  modified_base (9)..(9): 2' fluoro-modified a, c, u, g, or other
  modified_base (10)..(10): 2' O-methyl modified a, c, u, g, or other
  modified_base (11)..(11): 2' fluoro-modified a, c, u, g, or other
  modified_base (12)..(12): 2' O-methyl modified a, c, u, g, or other
  modified_base (13)..(13): 2' O-methyl modified a, c, u, g, or other
  modified_base (14)..(14): 2' O-methyl modified a, c, u, g, or other
  modified_base (15)..(15): 2' O-methyl modified a, c, u, g, or other
  modified_base (16)..(16): 2' O-methyl modified a, c, u, g, or other
  modified_base (17)..(17): 2' O-methyl modified a, c, u, g, or other
  modified_base (18)..(18): 2' O-methyl modified a, c, u, g, or other
  modified_base (19)..(19): 2' O-methyl modified a, c, u, g, or other
  misc_feature (19)..(20): Phosphorothioate linkage
  modified_base (20)..(20): 2' O-methyl modified a, c, u, g, or other
  misc_feature (20)..(21): Phosphorothioate linkage
  modified_base (21)..(21): 2' O-methyl modified a, c, u, g, or other
nnnnnnnnnnnnnnnnnnnnn

SEQ ID NO: 6336 - RNA, 21 nt, Artificial Sequence
  Description of Artificial Sequence: Synthetic oligonucleotide
  5' Phosphorothioate linkage
  modified_base (1)..(1): 2' O-methyl modified a, c, u, g, or other
  modified_base (2)..(2): 2' O-methyl modified a, c, u, g, or other
  modified_base (3)..(3): 2' O-methyl modified a, c, u, g, or other
  modified_base (4)..(4): 2' O-methyl modified a, c, u, g, or other
  modified_base (5)..(5): 2' O-methyl modified a, c, u, g, or other
  modified_base (6)..(6): 2' fluoro-modified a, c, u, g, or other
  modified_base (7)..(7): 2' O-methyl modified a, c, u, g, or other
  modified_base (8)..(8): 2' O-methyl modified a, c, u, g, or other
  modified_base (9)..(9): 2' fluoro-modified a, c, u, g, or other
  modified_base (10)..(10): 2' O-methyl modified a, c, u, g, or other
  modified_base (11)..(11): 2' fluoro-modified a, c, u, g, or other
  modified_base (12)..(12): 2' O-methyl modified a, c, u, g, or other
  modified_base (13)..(13): 2' O-methyl modified a, c, u, g, or other
  modified_base (14)..(14): 2' O-methyl modified a, c, u, g, or other
  modified_base (15)..(15): 2' O-methyl modified a, c, u, g, or other
  modified_base (16)..(16): 2' O-methyl modified a, c, u, g, or other
  modified_base (17)..(17): 2' O-methyl modified a, c, u, g, or other
  modified_base (18)..(18): 2' O-methyl modified a, c, u, g, or other
  modified_base (19)..(19): 2' O-methyl modified a, c, u, g, or other
  misc_feature (19)..(20): Phosphorothioate linkage
  modified_base (20)..(20): 2' O-methyl modified a, c, u, g, or other
  misc_feature (20)..(21): Phosphorothioate linkage
  modified_base (21)..(21): 2' O-methyl modified a, c, u, g, or other
nnnnnnnnnnnnnnnnnnnnn

SEQ ID NO: 6337 - RNA, 21 nt, Artificial Sequence
  Description of Artificial Sequence: Synthetic oligonucleotide
  5' Phosphorothioate linkage
  modified_base (1)..(1): 2' O-methyl modified a, c, u, g, or other
  modified_base (2)..(2): 2' O-methyl modified a, c, u, g, or other
  modified_base (3)..(3): 2' O-methyl modified a, c, u, g, or other
  modified_base (4)..(4): 2' O-methyl modified a, c, u, g, or other
  modified_base (5)..(5): 2' fluoro-modified a, c, u, g, or other
  modified_base (6)..(6): 2' O-methyl modified a, c, u, g, or other
  modified_base (7)..(7): 2' O-methyl modified a, c, u, g, or other
  modified_base (8)..(8): 2' fluoro-modified a, c, u, g, or other
  modified_base (9)..(9): 2' fluoro-modified a, c, u, g, or other
  modified_base (10)..(10): 2' fluoro-modified a, c, u, g, or other
  modified_base (11)..(11): 2' fluoro-modified a, c, u, g, or other
  modified_base (12)..(12): 2' O-methyl modified a, c, u, g, or other
  modified_base (13)..(13): 2' O-methyl modified a, c, u, g, or other
  modified_base (14)..(14): 2' O-methyl modified a, c, u, g, or other
  modified_base (15)..(15): 2' O-methyl modified a, c, u, g, or other
  modified_base (16)..(16): 2' O-methyl modified a, c, u, g, or other
  modified_base (17)..(17): 2' O-methyl modified a, c, u, g, or other
  modified_base (18)..(18): 2' O-methyl modified a, c, u, g, or other
  modified_base (19)..(19): 2' O-methyl modified a, c, u, g, or other
  misc_feature (19)..(20): Phosphorothioate linkage
  modified_base (20)..(20): 2' O-methyl modified a, c, u, g, or other
  misc_feature (20)..(21): Phosphorothioate linkage
  modified_base (21)..(21): 2' O-methyl modified a, c, u, g, or other
nnnnnnnnnnnnnnnnnnnnn

SEQ ID NO: 6338 - RNA, 21 nt, Artificial Sequence
  Description of Artificial Sequence: Synthetic oligonucleotide
  5' Phosphorothioate linkage
  modified_base (1)..(1): 2' O-methyl modified a, c, u, g, or other
  modified_base (2)..(2): 2' O-methyl modified a, c, u, g, or other
  modified_base (3)..(3): 2' O-methyl modified a, c, u, g, or other
  modified_base (4)..(4): 2' O-methyl modified a, c, u, g, or other
  modified_base (5)..(5): 2' O-methyl modified a, c, u, g, or other
  modified_base (6)..(6): 2' fluoro-modified a, c, u, g, or other
  modified_base (7)..(7): 2' fluoro-modified a, c, u, g, or other
  modified_base (8)..(8): 2' fluoro-modified a, c, u, g, or other
  modified_base (9)..(9): 2' fluoro-modified a, c, u, g, or other
  modified_base (10)..(10): 2' fluoro-modified a, c, u, g, or other
  modified_base (11)..(11): 2' O-methyl modified a, c, u, g, or other
  modified_base (12)..(12): 2' O-methyl modified a, c, u, g, or other
  modified_base (13)..(13): 2' O-methyl modified a, c, u, g, or other
  modified_base (14)..(14): 2' O-methyl modified a, c, u, g, or other
  modified_base (15)..(15): 2' O-methyl modified a, c, u, g, or other
  modified_base (16)..(16): 2' O-methyl modified a, c, u, g, or other
  modified_base (17)..(17): 2' O-methyl modified a, c, u, g, or other
  modified_base (18)..(18): 2' O-methyl modified a, c, u, g, or other
  modified_base (19)..(19): 2' O-methyl modified a, c, u, g, or other
  misc_feature (19)..(20): Phosphorothioate linkage
  modified_base (20)..(20): 2' O-methyl modified a, c, u, g, or other
  misc_feature (20)..(21): Phosphorothioate linkage
  modified_base (21)..(21): 2' O-methyl modified a, c, u, g, or other
nnnnnnnnnnnnnnnnnnnnn

SEQ ID NO: 6339 - RNA, 21 nt, Artificial Sequence
  Description of Artificial Sequence: Synthetic oligonucleotide
  5' Phosphorothioate linkage
  modified_base (1)..(1): 2' O-methyl modified a, c, u, g, or other
  modified_base (2)..(2): 2' O-methyl modified a, c, u, g, or other
  modified_base (3)..(3): 2' O-methyl modified a, c, u, g, or other
  modified_base (4)..(4): 2' O-methyl modified a, c, u, g, or other
  modified_base (5)..(5): 2' O-methyl modified a, c, u, g, or other
  modified_base (6)..(6): 2' fluoro-modified a, c, u, g, or other
  modified_base (7)..(7): 2' O-methyl modified a, c, u, g, or other
  modified_base (8)..(8): 2' O-methyl modified a, c, u, g, or other
  modified_base (9)..(9): 2' fluoro-modified a, c, u, g, or other
  modified_base (10)..(10): 2' fluoro-modified a, c, u, g, or other
  modified_base (11)..(11): 2' O-methyl modified a, c, u, g, or other
  modified_base (12)..(12): 2' O-methyl modified a, c, u, g, or other
  modified_base (13)..(13): 2' O-methyl modified a, c, u, g, or other
  modified_base (14)..(14): 2' O-methyl modified a, c, u, g, or other
  modified_base (15)..(15): 2' O-methyl modified a, c, u, g, or other
  modified_base (16)..(16): 2' O-methyl modified a, c, u, g, or other
  modified_base (17)..(17): 2' O-methyl modified a, c, u, g, or other
  modified_base (18)..(18): 2' O-methyl modified a, c, u, g, or other
  modified_base (19)..(19): 2' O-methyl modified a, c, u, g, or other
  misc_feature (19)..(20): Phosphorothioate linkage
  modified_base (20)..(20): 2' O-methyl modified a, c, u, g, or other
  misc_feature (20)..(21): Phosphorothioate linkage
  modified_base (21)..(21): 2' O-methyl modified a, c, u, g, or other
nnnnnnnnnnnnnnnnnnnnn

SEQ ID NO: 6340 - RNA, 21 nt, Artificial Sequence
  Description of Artificial Sequence: Synthetic oligonucleotide
  5' Phosphorothioate linkage
  modified_base (1)..(1): 2' O-methyl modified a, c, u, g, or other
  modified_base (2)..(2): 2' O-methyl modified a, c, u, g, or other
  modified_base (3)..(3): 2' O-methyl modified a, c, u, g, or other
  modified_base (4)..(4): 2' O-methyl modified a, c, u, g, or other
  modified_base (5)..(5): 2' O-methyl modified a, c, u, g, or other
  modified_base (6)..(6): 2' O-methyl modified a, c, u, g, or other
  modified_base (7)..(7): 2' fluoro-modified a, c, u, g, or other
  modified_base (8)..(8): 2' O-methyl modified a, c, u, g, or other
  modified_base (9)..(9): 2' fluoro-modified a, c, u, g, or other
  modified_base (10)..(10): 2' fluoro-modified a, c, u, g, or other
  modified_base (11)..(11): 2' O-methyl modified a, c, u, g, or other
  modified_base (12)..(12): 2' O-methyl modified a, c, u, g, or other
  modified_base (13)..(13): 2' O-methyl modified a, c, u, g, or other
  modified_base (14)..(14): 2' O-methyl modified a, c, u, g, or other
  modified_base (15)..(15): 2' O-methyl modified a, c, u, g, or other
  modified_base (16)..(16): 2' O-methyl modified a, c, u, g, or other
  modified_base (17)..(17): 2' O-methyl modified a, c, u, g, or other
  modified_base (18)..(18): 2' O-methyl modified a, c, u, g, or other
  modified_base (19)..(19): 2' O-methyl modified a, c, u, g, or other
  misc_feature (19)..(20): Phosphorothioate linkage
  modified_base (20)..(20): 2' O-methyl modified a, c, u, g, or other
  misc_feature (20)..(21): Phosphorothioate linkage
  modified_base (21)..(21): 2' O-methyl modified a, c, u, g, or other
nnnnnnnnnnnnnnnnnnnnn

SEQ ID NO: 6341 - RNA, 21 nt, Artificial Sequence
  Description of Artificial Sequence: Synthetic oligonucleotide
  5' Phosphorothioate linkage
  modified_base (1)..(1): 2' O-methyl modified a, c, u, g, or other
  modified_base (2)..(2): 2' O-methyl modified a, c, u, g, or other
  modified_base (3)..(3): 2' O-methyl modified a, c, u, g, or other
  modified_base (4)..(4): 2' O-methyl modified a, c, u, g, or other
  modified_base (5)..(5): 2' fluoro-modified a, c, u, g, or other
  modified_base (6)..(6): 2' fluoro-modified a, c, u, g, or other
  modified_base (7)..(7): 2' O-methyl modified a, c, u, g, or other
  modified_base (8)..(8): 2' O-methyl modified a, c, u, g, or other
  modified_base (9)..(9): 2' fluoro-modified a, c, u, g, or other
  modified_base (10)..(10): 2' fluoro-modified a, c, u, g, or other
  modified_base (11)..(11): 2' O-methyl modified a, c, u, g, or other
  modified_base (12)..(12): 2' O-methyl modified a, c, u, g, or other
  modified_base (13)..(13): 2' O-methyl modified a, c, u, g, or other
  modified_base (14)..(14): 2' O-methyl modified a, c, u, g, or other
  modified_base (15)..(15): 2' O-methyl modified a, c, u, g, or other
  modified_base (16)..(16): 2' O-methyl modified a, c, u, g, or other
  modified_base (17)..(17): 2' O-methyl modified a, c, u, g, or other
  modified_base (18)..(18): 2' O-methyl modified a, c, u, g, or other
  modified_base (19)..(19): 2' O-methyl modified a, c, u, g, or other
  misc_feature (19)..(20): Phosphorothioate linkage
  modified_base (20)..(20): 2' O-methyl modified a, c, u, g, or other
  misc_feature (20)..(21): Phosphorothioate linkage
  modified_base (21)..(21): 2' O-methyl modified a, c, u, g, or other
nnnnnnnnnnnnnnnnnnnnn

SEQ ID NO: 6342 - RNA, 21 nt, Artificial Sequence
  Description of Artificial Sequence: Synthetic oligonucleotide
  5' Phosphorothioate linkage
  modified_base (1)..(1): 2' O-methyl modified a, c, u, g, or other
  modified_base (2)..(2): 2' O-methyl modified a, c, u, g, or other
  modified_base (3)..(3): 2' O-methyl modified a, c, u, g, or other
  modified_base (4)..(4): 2' O-methyl modified a, c, u, g, or other
  modified_base (5)..(5): 2' fluoro-modified a, c, u, g, or other
  modified_base (6)..(6): 2' O-methyl modified a, c, u, g, or other
  modified_base (7)..(7): 2' O-methyl modified a, c, u, g, or other
  modified_base (8)..(8): 2' fluoro-modified a, c, u, g, or other
  modified_base (9)..(9): 2' fluoro-modified a, c, u, g, or other
  modified_base (10)..(10): 2' O-methyl modified a, c, u, g, or other
  modified_base (11)..(11): 2' O-methyl modified a, c, u, g, or other
  modified_base (12)..(12): 2' O-methyl modified a, c, u, g, or other
  modified_base (13)..(13): 2' O-methyl modified a, c, u, g, or other
  modified_base (14)..(14): 2' O-methyl modified a, c, u, g, or other
  modified_base (15)..(15): 2' O-methyl modified a, c, u, g, or other
  modified_base (16)..(16): 2' O-methyl modified a, c, u, g, or other
  modified_base (17)..(17): 2' O-methyl modified a, c, u, g, or other
  modified_base (18)..(18): 2' O-methyl modified a, c, u, g, or other
  modified_base (19)..(19): 2' O-methyl modified a, c, u, g, or other
  misc_feature (19)..(20): Phosphorothioate linkage
  modified_base (20)..(20): 2' O-methyl modified a, c, u, g, or other
  misc_feature (20)..(21): Phosphorothioate linkage
  modified_base (21)..(21): 2' O-methyl modified a, c, u, g, or other
nnnnnnnnnnnnnnnnnnnnn

SEQ ID NO: 6343 - DNA, 21 bp, Artificial Sequence
  Description of Artificial Sequence: Synthetic oligonucleotide
  Description of Combined DNA/RNA Molecule: Synthetic oligonucleotide
  5' Phosphorothioate linkage
  modified_base (1)..(1): 2' O-methyl modified a, c, u, g, or other
  modified_base (2)..(2): 2' O-methyl modified a, c, u, g, or other
  modified_base (3)..(3): 2' O-methyl modified a, c, u, g, or other
  modified_base (4)..(4): 2' O-methyl modified a, c, u, g, or other
  modified_base (5)..(5): 2' fluoro-modified a, c, u, g, or other
  modified_base (6)..(6): 2' O-methyl modified a, c, u, g, or other
  modified_base (7)..(7): 2' deoxy-modified a, c, u, g, or other
  modified_base (8)..(8): 2' O-methyl modified a, c, u, g, or other
  modified_base (9)..(9): 2' fluoro-modified a, c, u, g, or other
  modified_base (10)..(10): 2' O-methyl modified a, c, u, g, or other
  modified_base (11)..(11): 2' fluoro-modified a, c, u, g, or other
  modified_base (12)..(12): 2' O-methyl modified a, c, u, g, or other
  modified_base (13)..(13): 2' O-methyl modified a, c, u, g, or other
  modified_base (14)..(14): 2' O-methyl modified a, c, u, g, or other
  modified_base (15)..(15): 2' O-methyl modified a, c, u, g, or other
  modified_base (16)..(16): 2' O-methyl modified a, c, u, g, or other
  modified_base (17)..(17): 2' O-methyl modified a, c, u, g, or other
  modified_base (18)..(18): 2' O-methyl modified a, c, u, g, or other
  modified_base (19)..(19): 2' O-methyl modified a, c, u, g, or other
  misc_feature (19)..(20): Phosphorothioate linkage
  modified_base (20)..(20): 2' O-methyl modified a, c, u, g, or other
  misc_feature (20)..(21): Phosphorothioate linkage
  modified_base (21)..(21): 2' O-methyl modified a, c, u, g, or other
nnnnnnnnnnnnnnnnnnnnn

SEQ ID NO: 6344 - DNA, 21 bp, Artificial Sequence
  Description of Artificial Sequence: Synthetic oligonucleotide
  Description of Combined DNA/RNA Molecule: Synthetic oligonucleotide
  5' Phosphorothioate linkage
  modified_base (1)..(1): 2' O-methyl modified a, c, u, g, or other
  modified_base (2)..(2): 2' O-methyl modified a, c, u, g, or other
  modified_base (3)..(3): 2' O-methyl modified a, c, u, g, or other
  modified_base (4)..(4): 2' O-methyl modified a, c, u, g, or other
  modified_base (5)..(5): 2' O-methyl modified a, c, u, g, or other
  modified_base (6)..(6): 2' O-methyl modified a, c, u, g, or other
  modified_base (7)..(7): 2' O-methyl modified a, c, u, g, or other
  modified_base (8)..(8): 2' O-methyl modified a, c, u, g, or other
  modified_base (9)..(9): 2' fluoro-modified a, c, u, g, or other
  modified_base (10)..(10): 2' deoxy-modified a, c, u, g, or other
  modified_base (11)..(11): 2' fluoro-modified a, c, u, g, or other
  modified_base (12)..(12): 2' O-methyl modified a, c, u, g, or other
  modified_base (13)..(13): 2' O-methyl modified a, c, u, g, or other
  modified_base (14)..(14): 2' O-methyl modified a, c, u, g, or other
  modified_base (15)..(15): 2' O-methyl modified a, c, u, g, or other
  modified_base (16)..(16): 2' O-methyl modified a, c, u, g, or other
  modified_base (17)..(17): 2' O-methyl modified a, c, u, g, or other
  modified_base (18)..(18): 2' O-methyl modified a, c, u, g, or other
  modified_base (19)..(19): 2' O-methyl modified a, c, u, g, or other
  misc_feature (19)..(20): Phosphorothioate linkage
  modified_base (20)..(20): 2' O-methyl modified a, c, u, g, or other
  misc_feature (20)..(21): Phosphorothioate linkage
  modified_base (21)..(21): 2' O-methyl modified a, c, u, g, or other
nnnnnnnnnnnnnnnnnnnnn

SEQ ID NO: 6345 - RNA, 21 nt, Artificial Sequence
  Description of Artificial Sequence: Synthetic oligonucleotide
  modified_base (1)..(1): 2' O-methyl modified a, c, u, g, or other
  misc_feature (1)..(2): Phosphorothioate linkage
  modified_base (2)..(2): 2' fluoro-modified a, c, u, g, or other
  misc_feature (2)..(3): Phosphorothioate linkage
  modified_base (3)..(3): 2' O-methyl modified a, c, u, g, or other
  modified_base (4)..(4): 2' fluoro-modified a, c, u, g, or other
  modified_base (5)..(5): 2' O-methyl modified a, c, u, g, or other
  modified_base (6)..(6): 2' O-methyl modified a, c, u, g, or other
  modified_base (7)..(7): 2' O-methyl modified a, c, u, g, or other
  modified_base (8)..(8): 2' fluoro-modified a, c, u, g, or other
  modified_base (9)..(9): 2' O-methyl modified a, c, u, g, or other
  modified_base (10)..(10): 2' O-methyl modified a, c, u, g, or other
  modified_base (11)..(11): 2' O-methyl modified a, c, u, g, or other
  modified_base (12)..(12): 2' fluoro-modified a, c, u, g, or other
  modified_base (13)..(13): 2' O-methyl modified a, c, u, g, or other
  modified_base (14)..(14): 2' fluoro-modified a, c, u, g, or other
  modified_base (15)..(15): 2' O-methyl modified a, c, u, g, or other
  modified_base (16)..(16): 2' fluoro-modified a, c, u, g, or other
  modified_base (17)..(17): 2' O-methyl modified a, c, u, g, or other
  modified_base (18)..(18): 2' fluoro-modified a, c, u, g, or other
  modified_base (19)..(19): 2' O-methyl modified a, c, u, g, or other
  misc_feature (19)..(20): Phosphorothioate linkage
  modified_base (20)..(20): 2' O-methyl modified a, c, u, g, or other
  misc_feature (20)..(21): Phosphorothioate linkage
  modified_base (21)..(21): 2' O-methyl modified a, c, u, g, or other
nnnnnnnnnnnnnnnnnnnnn

SEQ ID NO: 6346 - RNA, 21 nt, Artificial Sequence
  Description of Artificial Sequence: Synthetic oligonucleotide
  modified_base (1)..(1): 2' O-methyl modified a, c, u, g, or other
  misc_feature (1)..(2): Phosphorothioate linkage
  modified_base (2)..(2): 2' fluoro-modified a, c, u, g, or other
  misc_feature (2)..(3): Phosphorothioate linkage
  modified_base (3)..(3): 2' O-methyl modified a, c, u, g, or other
  modified_base (4)..(4): 2' fluoro-modified a, c, u, g, or other
  modified_base (5)..(5): 2' O-methyl modified a, c, u, g, or other
  modified_base (6)..(6): 2' fluoro-modified a, c, u, g, or other
  modified_base (7)..(7): 2' O-methyl modified a, c, u, g, or other
  modified_base (8)..(8): 2' O-methyl modified a, c, u, g, or other
  modified_base (9)..(9): 2' O-methyl modified a, c, u, g, or other
  modified_base (10)..(10): 2' fluoro-modified a, c, u, g, or other
  modified_base (11)..(11): 2' O-methyl modified a, c, u, g, or other
  modified_base (12)..(12): 2' fluoro-modified a, c, u, g, or other
  modified_base (13)..(13): 2' O-methyl modified a, c, u, g, or other
  modified_base (14)..(14): 2' fluoro-modified a, c, u, g, or other
  modified_base (15)..(15): 2' O-methyl modified a, c, u, g, or other
  modified_base (16)..(16): 2' fluoro-modified a, c, u, g, or other
  modified_base (17)..(17): 2' O-methyl modified a, c, u, g, or other
  modified_base (18)..(18): 2' fluoro-modified a, c, u, g, or other
  modified_base (19)..(19): 2' O-methyl modified a, c, u, g, or other
  misc_feature (19)..(20): Phosphorothioate linkage
  modified_base (20)..(20): 2' O-methyl modified a, c, u, g, or other
  misc_feature (20)..(21): Phosphorothioate linkage
  modified_base (21)..(21): 2' O-methyl modified a, c, u, g, or other
nnnnnnnnnnnnnnnnnnnnn

SEQ ID NO: 6347 - RNA, 21 nt, Artificial Sequence
  Description of Artificial Sequence: Synthetic oligonucleotide
  modified_base (1)..(1): 2' O-methyl modified a, c, u, g, or other
  misc_feature (1)..(2): Phosphorothioate linkage
  modified_base (2)..(2): 2' fluoro-modified a, c, u, g, or other
  misc_feature (2)..(3): Phosphorothioate linkage
  modified_base (3)..(3): 2' O-methyl modified a, c, u, g, or other
  modified_base (4)..(4): 2' fluoro-modified a, c, u, g, or other
  modified_base (5)..(5): 2' O-methyl modified a, c, u, g, or other
  modified_base (6)..(6): 2' fluoro-modified a, c, u, g, or other
  modified_base (7)..(7): 2' O-methyl modified a, c, u, g, or other
  modified_base (8)..(8): 2' O-methyl modified a, c, u, g, or other
  modified_base (9)..(9): 2' O-methyl modified a, c, u, g, or other
  modified_base (10)..(10): 2' O-methyl modified a, c, u, g, or other
  modified_base (11)..(11): 2' O-methyl modified a, c, u, g, or other
  modified_base (12)..(12): 2' fluoro-modified a, c, u, g, or other
  modified_base (13)..(13): 2' O-methyl modified a, c, u, g, or other
  modified_base (14)..(14): 2' fluoro-modified a, c, u, g, or other
  modified_base (15)..(15): 2' O-methyl modified a, c, u, g, or other
  modified_base (16)..(16): 2' fluoro-modified a, c, u, g, or other
  modified_base (17)..(17): 2' O-methyl modified a, c, u, g, or other
  modified_base (18)..(18): 2' fluoro-modified a, c, u, g, or other
  modified_base (19)..(19): 2' O-methyl modified a, c, u, g, or other
  misc_feature (19)..(20): Phosphorothioate linkage
  modified_base (20)..(20): 2' O-methyl modified a, c, u, g, or other
  misc_feature (20)..(21): Phosphorothioate linkage
  modified_base (21)..(21): 2' O-methyl modified a, c, u, g, or other
nnnnnnnnnnnnnnnnnnnnn

SEQ ID NO: 6348 - RNA, 21 nt, Artificial Sequence
  Description of Artificial Sequence: Synthetic oligonucleotide
  modified_base (1)..(1): 2' O-methyl modified a, c, u, g, or other
  misc_feature (1)..(2): Phosphorothioate linkage
  modified_base (2)..(2): 2' fluoro-modified a, c, u, g, or other
  misc_feature (2)..(3): Phosphorothioate linkage
  modified_base (3)..(3): 2' O-methyl modified a, c, u, g, or other
  modified_base (4)..(4): 2' fluoro-modified a, c, u, g, or other
  modified_base (5)..(5): 2' O-methyl modified a, c, u, g, or other
  modified_base (6)..(6): 2' O-methyl modified a, c, u, g, or other
  modified_base (7)..(7): 2' fluoro-modified a, c, u, g, or other
  modified_base (8)..(8): 2' fluoro-modified a, c, u, g, or other
  modified_base (9)..(9): 2' O-methyl modified a, c, u, g, or other
  modified_base (10)..(10): 2' fluoro-modified a, c, u, g, or other
  modified_base (11)..(11): 2' O-methyl modified a, c, u, g, or other
  modified_base (12)..(12): 2' fluoro-modified a, c, u, g, or other
  modified_base (13)..(13): 2' O-methyl modified a, c, u, g, or other
  modified_base (14)..(14): 2' fluoro-modified a, c, u, g, or other
  modified_base (15)..(15): 2' O-methyl modified a, c, u, g, or other
  modified_base (16)..(16): 2' fluoro-modified a, c, u, g, or other
  modified_base (17)..(17): 2' O-methyl modified a, c, u, g, or other
  modified_base (18)..(18): 2' fluoro-modified a, c, u, g, or other
  modified_base (19)..(19): 2' O-methyl modified a, c, u, g, or other
  misc_feature (19)..(20): Phosphorothioate linkage
  modified_base (20)..(20): 2' O-methyl modified a, c, u, g, or other
  misc_feature (20)..(21): Phosphorothioate linkage
  modified_base (21)..(21): 2' O-methyl modified a, c, u, g, or other
nnnnnnnnnnnnnnnnnnnnn

SEQ ID NO: 6349 - RNA, 21 nt, Artificial Sequence
  Description of Artificial Sequence: Synthetic oligonucleotide
  modified_base (1)..(1): 2' O-methyl modified a, c, u, g, or other
  misc_feature (1)..(2): Phosphorothioate linkage
  modified_base (2)..(2): 2' fluoro-modified a, c, u, g, or other
  misc_feature (2)..(3): Phosphorothioate linkage
  modified_base (3)..(3): 2' O-methyl modified a, c, u, g, or other
  modified_base (4)..(4): 2' fluoro-modified a, c, u, g, or other
  modified_base (5)..(5): 2' O-methyl modified a, c, u, g, or other
  modified_base (6)..(6): 2' O-methyl modified a, c, u, g, or other
  modified_base (7)..(7): 2' O-methyl modified a, c, u, g, or other
  modified_base (8)..(8): 2' fluoro-modified a, c, u, g, or other
  modified_base (9)..(9): 2' O-methyl modified a, c, u, g, or other
  modified_base (10)..(10): 2' fluoro-modified a, c, u, g, or other
  modified_base (11)..(11): 2' O-methyl modified a, c, u, g, or other
  modified_base (12)..(12): 2' fluoro-modified a, c, u, g, or other
  modified_base (13)..(13): 2' O-methyl modified a, c, u, g, or other
  modified_base (14)..(14): 2' fluoro-modified a, c, u, g, or other
  modified_base (15)..(15): 2' O-methyl modified a, c, u, g, or other
  modified_base (16)..(16): 2' fluoro-modified a, c, u, g, or other
  modified_base (17)..(17): 2' O-methyl modified a, c, u, g, or other
  modified_base (18)..(18): 2' fluoro-modified a, c, u, g, or other
  modified_base (19)..(19): 2' O-methyl modified a, c, u, g, or other
  misc_feature (19)..(20): Phosphorothioate linkage
  modified_base (20)..(20): 2' O-methyl modified a, c, u, g, or other
  misc_feature (20)..(21): Phosphorothioate linkage
  modified_base (21)..(21): 2' O-methyl modified a, c, u, g, or other
nnnnnnnnnnnnnnnnnnnnn

SEQ ID NO: 6350 - RNA, 21 nt, Artificial Sequence
  Description of Artificial Sequence: Synthetic oligonucleotide
  modified_base (1)..(1): 2' O-methyl modified a, c, u, g, or other
  misc_feature (1)..(2): Phosphorothioate linkage
  modified_base (2)..(2): 2' fluoro-modified a, c, u, g, or other
  misc_feature (2)..(3): Phosphorothioate linkage
  modified_base (3)..(3): 2' O-methyl modified a, c, u, g, or other
  modified_base (4)..(4): 2' O-methyl modified a, c, u, g, or other
  modified_base (5)..(5): 2' fluoro-modified a, c, u, g, or other
  modified_base (6)..(6): 2' O-methyl modified a, c, u, g, or other
  modified_base (7)..(7): 2' fluoro-modified a, c, u, g, or other
  modified_base (8)..(8): 2' O-methyl modified a, c, u, g, or other
  modified_base (9)..(9): 2' O-methyl modified a, c, u, g, or other
  modified_base (10)..(10): 2' fluoro-modified a, c, u, g, or other
  modified_base (11)..(11): 2' O-methyl modified a, c, u, g, or other
  modified_base (12)..(12): 2' fluoro-modified a, c, u, g, or other
  modified_base (13)..(13): 2' O-methyl modified a, c, u, g, or other
  modified_base (14)..(14): 2' fluoro-modified a, c, u, g, or other
  modified_base (15)..(15): 2' O-methyl modified a, c, u, g, or other
  modified_base (16)..(16): 2' fluoro-modified a, c, u, g, or other
  modified_base (17)..(17): 2' O-methyl modified a, c, u, g, or other
  modified_base (18)..(18): 2' fluoro-modified a, c, u, g, or other
  modified_base (19)..(19): 2' O-methyl modified a, c, u, g, or other
  misc_feature (19)..(20): Phosphorothioate linkage
  modified_base (20)..(20): 2' O-methyl modified a, c, u, g, or other
  misc_feature (20)..(21): Phosphorothioate linkage
  modified_base (21)..(21): 2' O-methyl modified a, c, u, g, or other
nnnnnnnnnnnnnnnnnnnnn

SEQ ID NO: 6351 - RNA, 21 nt, Artificial Sequence
  Description of Artificial Sequence: Synthetic oligonucleotide
  modified_base (1)..(1): 2' O-methyl modified a, c, u, g, or other
  misc_feature (1)..(2): Phosphorothioate linkage
  modified_base (2)..(2): 2' fluoro-modified a, c, u, g, or other
  misc_feature (2)..(3): Phosphorothioate linkage
  modified_base (3)..(3): 2' O-methyl modified a, c, u, g, or other
  modified_base (4)..(4): 2' O-methyl modified a, c, u, g, or other
  modified_base (5)..(5): 2' O-methyl modified a, c, u, g, or other
  modified_base (6)..(6): 2' O-methyl modified a, c, u, g, or other
  modified_base (7)..(7): 2' fluoro-modified a, c, u, g, or other
  modified_base (8)..(8): 2' O-methyl modified a, c, u, g, or other
  modified_base (9)..(9): 2' O-methyl modified a, c, u, g, or other
  modified_base (10)..(10): 2' fluoro-modified a, c, u, g, or other
  modified_base (11)..(11): 2' O-methyl modified a, c, u, g, or other
  modified_base (12)..(12): 2' fluoro-modified a, c, u, g, or other
  modified_base (13)..(13): 2' O-methyl modified a, c, u, g, or other
  modified_base (14)..(14): 2' fluoro-modified a, c, u, g, or other
  modified_base (15)..(15): 2' O-methyl modified a, c, u, g, or other
  modified_base (16)..(16): 2' fluoro-modified a, c, u, g, or other
  modified_base (17)..(17): 2' O-methyl modified a, c, u, g, or other
  modified_base (18)..(18): 2' fluoro-modified a, c, u, g, or other
  modified_base (19)..(19): 2' O-methyl modified a, c, u, g, or other
  misc_feature (19)..(20): Phosphorothioate linkage
  modified_base (20)..(20): 2' O-methyl modified a, c, u, g, or other
  misc_feature (20)..(21): Phosphorothioate linkage
  modified_base (21)..(21): 2' O-methyl modified a, c, u, g, or other
nnnnnnnnnnnnnnnnnnnnn

SEQ ID NO: 6352 - RNA, 21 nt, Artificial Sequence
  Description of Artificial Sequence: Synthetic oligonucleotide
  modified_base (1)..(1): 2' O-methyl modified a, c, u, g, or other
  misc_feature (1)..(2): Phosphorothioate linkage
  modified_base (2)..(2): 2' fluoro-modified a, c, u, g, or other
  misc_feature (2)..(3): Phosphorothioate linkage
  modified_base (3)..(3): 2' O-methyl modified a, c, u, g, or other
  modified_base (4)..(4): 2' O-methyl modified a, c, u, g, or other
  modified_base (5)..(5): 2' O-methyl modified a, c, u, g, or other
  modified_base (6)..(6): 2' fluoro-modified a, c, u, g, or other
  modified_base (7)..(7): 2' O-methyl modified a, c, u, g, or other
  modified_base (8)..(8): 2' O-methyl modified a, c, u, g, or other
  modified_base (9)..(9): 2' O-methyl modified a, c, u, g, or other
  modified_base (10)..(10): 2' fluoro-modified a, c, u, g, or other
  modified_base (11)..(11): 2' O-methyl modified a, c, u, g, or other
  modified_base (12)..(12): 2' fluoro-modified a, c, u, g, or other
  modified_base (13)..(13): 2' O-methyl modified a, c, u, g, or other
  modified_base (14)..(14): 2' fluoro-modified a, c, u, g, or other
  modified_base (15)..(15): 2' O-methyl modified a, c, u, g, or other
  modified_base (16)..(16): 2' fluoro-modified a, c, u, g, or other
  modified_base (17)..(17): 2' O-methyl modified a, c, u, g, or other
  modified_base (18)..(18): 2' fluoro-modified a, c, u, g, or other
  modified_base (19)..(19): 2' O-methyl modified a, c, u, g, or other
  misc_feature (19)..(20): Phosphorothioate linkage
  modified_base (20)..(20): 2' O-methyl modified a, c, u, g, or other
  misc_feature (20)..(21): Phosphorothioate linkage
  modified_base (21)..(21): 2' O-methyl modified a, c, u, g, or other
nnnnnnnnnnnnnnnnnnnnn

SEQ ID NO: 6353 - RNA, 21 nt, Artificial Sequence
  Description of Artificial Sequence: Synthetic oligonucleotide
  modified_base (1)..(1): 2' O-methyl modified a, c, u, g, or other
  misc_feature (1)..(2): Phosphorothioate linkage
  modified_base (2)..(2): 2' fluoro-modified a, c, u, g, or other
  misc_feature (2)..(3): Phosphorothioate linkage
  modified_base (3)..(3): 2' O-methyl modified a, c, u, g, or other
  modified_base (4)..(4): 2' fluoro-modified a, c, u, g, or other
  modified_base (5)..(5): 2' O-methyl modified a, c, u, g, or other
  modified_base (6)..(6): 2' O-methyl modified a, c, u, g, or other
  modified_base (7)..(7): 2' fluoro-modified a, c, u, g, or other
  modified_base (8)..(8): 2' O-methyl modified a, c, u, g, or other
  modified_base (9)..(9): 2' O-methyl modified a, c, u, g, or other
  modified_base (10)..(10): 2' fluoro-modified a, c, u, g, or other
  modified_base (11)..(11): 2' O-methyl modified a, c, u, g, or other
  modified_base (12)..(12): 2' fluoro-modified a, c, u, g, or other
  modified_base (13)..(13): 2' O-methyl modified a, c, u, g, or other
  modified_base (14)..(14): 2' fluoro-modified a, c, u, g, or other
  modified_base (15)..(15): 2' O-methyl modified a, c, u, g, or other
  modified_base (16)..(16): 2' fluoro-modified a, c, u, g, or other
  modified_base (17)..(17): 2' O-methyl modified a, c, u, g, or other
  modified_base (18)..(18): 2' fluoro-modified a, c, u, g, or other
  modified_base (19)..(19): 2' O-methyl modified a, c, u, g, or other
  misc_feature (19)..(20): Phosphorothioate linkage
  modified_base (20)..(20): 2' O-methyl modified a, c, u, g, or other
  misc_feature (20)..(21): Phosphorothioate linkage
  modified_base (21)..(21): 2' O-methyl modified a, c, u, g, or other
nnnnnnnnnnnnnnnnnnnnn

SEQ ID NO: 6354 - RNA, 21 nt, Artificial Sequence
  Description of Artificial Sequence: Synthetic oligonucleotide
  modified_base (1)..(1): 2' O-methyl modified a, c, u, g, or other
  misc_feature (1)..(2): Phosphorothioate linkage
  modified_base (2)..(2): 2' fluoro-modified a, c, u, g, or other
  misc_feature (2)..(3): Phosphorothioate linkage
  modified_base (3)..(3): 2' O-methyl modified a, c, u, g, or other
  modified_base (4)..(4): 2' O-methyl modified a, c, u, g, or other
  modified_base (5)..(5): 2' O-methyl modified a, c, u, g, or other
  modified_base (6)..(6): 2' fluoro-modified a, c, u, g, or other
  modified_base (7)..(7): 2' O-methyl modified a, c, u, g, or other
  modified_base (8)..(8): 2' fluoro-modified a, c, u, g, or other
  modified_base (9)..(9): 2' O-methyl modified a, c, u, g, or other
  modified_base (10)..(10): 2' fluoro-modified a, c, u, g, or other
  modified_base (11)..(11): 2' O-methyl modified a, c, u, g, or other
  modified_base (12)..(12): 2' fluoro-modified a, c, u, g, or other
  modified_base (13)..(13): 2' O-methyl modified a, c, u, g, or other
  modified_base (14)..(14): 2' fluoro-modified a, c, u, g, or other
  modified_base (15)..(15): 2' O-methyl modified a, c, u, g, or other
  modified_base (16)..(16): 2' fluoro-modified a, c, u, g, or other
  modified_base (17)..(17): 2' O-methyl modified a, c, u, g, or other
  modified_base (18)..(18): 2' fluoro-modified a, c, u, g, or other
  modified_base (19)..(19): 2' O-methyl modified a, c, u, g, or other
  misc_feature (19)..(20): Phosphorothioate linkage
  modified_base (20)..(20): 2' O-methyl modified a, c, u, g, or other
  misc_feature (20)..(21): Phosphorothioate linkage
  modified_base (21)..(21): 2' O-methyl modified a, c, u, g, or other
nnnnnnnnnnnnnnnnnnnnn

SEQ ID NO: 6355 - RNA, 21 nt, Artificial Sequence
  Description of Artificial Sequence: Synthetic oligonucleotide
  modified_base (1)..(1): 2' O-methyl modified a, c, u, g, or other
  misc_feature (1)..(2): Phosphorothioate linkage
  modified_base (2)..(2): 2' fluoro-modified a, c, u, g, or other
  misc_feature (2)..(3): Phosphorothioate linkage
  modified_base (3)..(3): 2' O-methyl modified a, c, u, g, or other
  modified_base (4)..(4): 2' fluoro-modified a, c, u, g, or other
  modified_base (5)..(5): 2' O-methyl modified a, c, u, g, or other
  modified_base (6)..(6): 2' fluoro-modified a, c, u, g, or other
  modified_base (7)..(7): 2' O-methyl modified a, c, u, g, or other
  modified_base (8)..(8): 2' fluoro-modified a, c, u, g, or other
  modified_base (9)..(9): 2' O-methyl modified a, c, u, g, or other
  modified_base (10)..(10): 2' O-methyl modified a, c, u, g, or other
  modified_base (11)..(11): 2' O-methyl modified a, c, u, g, or other
  modified_base (12)..(12): 2' fluoro-modified a, c, u, g, or other
  modified_base (13)..(13): 2' O-methyl modified a, c, u, g, or other
  modified_base (14)..(14): 2' fluoro-modified a, c, u, g, or other
  modified_base (15)..(15): 2' O-methyl modified a, c, u, g, or other
  modified_base (16)..(16): 2' fluoro-modified a, c, u, g, or other
  modified_base (17)..(17): 2' O-methyl modified a, c, u, g, or other
  modified_base (18)..(18): 2' fluoro-modified a, c, u, g, or other
  modified_base (19)..(19): 2' O-methyl modified a, c, u, g, or other
  misc_feature (19)..(20): Phosphorothioate linkage
  modified_base (20)..(20): 2' O-methyl modified a, c, u, g, or other
  misc_feature (20)..(21): Phosphorothioate linkage
  modified_base (21)..(21): 2' O-methyl modified a, c, u, g, or other
nnnnnnnnnnnnnnnnnnnnn

SEQ ID NO: 6356 - RNA, 21 nt, Artificial Sequence
  Description of Artificial Sequence: Synthetic oligonucleotide
  modified_base (1)..(1): 2' O-methyl modified a, c, u, g, or other
  misc_feature (1)..(2): Phosphorothioate linkage
  modified_base (2)..(2): 2' fluoro-modified a, c, u, g, or other
  misc_feature (2)..(3): Phosphorothioate linkage
  modified_base (3)..(3): 2' O-methyl modified a, c, u, g, or other
  modified_base (4)..(4): 2' O-methyl modified a, c, u, g, or other
  modified_base (5)..(5): 2' O-methyl modified a, c, u, g, or other
  modified_base (6)..(6): 2' fluoro-modified a, c, u, g, or other
  modified_base (7)..(7): 2' O-methyl modified a, c, u, g, or other
  modified_base (8)..(8): 2' fluoro-modified a, c, u, g, or other
  modified_base (9)..(9): 2' O-methyl modified a, c, u, g, or other
  modified_base (10)..(10): 2' O-methyl modified a, c, u, g, or other
  modified_base (11)..(11): 2' O-methyl modified a, c, u, g, or other
  modified_base (12)..(12): 2' fluoro-modified a, c, u, g, or other
  modified_base (13)..(13): 2' O-methyl modified a, c, u, g, or other
  modified_base (14)..(14): 2' fluoro-modified a, c, u, g, or other
  modified_base (15)..(15): 2' O-methyl modified a, c, u, g, or other
  modified_base (16)..(16): 2' fluoro-modified a, c, u, g, or other
  modified_base (17)..(17): 2' O-methyl modified a, c, u, g, or other
  modified_base (18)..(18): 2' fluoro-modified a, c, u, g, or other
  modified_base (19)..(19): 2' O-methyl modified a, c, u, g, or other
  misc_feature (19)..(20): Phosphorothioate linkage
  modified_base (20)..(20): 2' O-methyl modified a, c, u, g, or other
  misc_feature (20)..(21): Phosphorothioate linkage
  modified_base (21)..(21): 2' O-methyl modified a, c, u, g, or other
nnnnnnnnnnnnnnnnnnnnn

SEQ ID NO: 6357 - RNA, 21 nt, Artificial Sequence
  Description of Artificial Sequence: Synthetic oligonucleotide
  modified_base (1)..(1): 2' O-methyl modified a, c, u, g, or other
  misc_feature (1)..(2): Phosphorothioate linkage
  modified_base (2)..(2): 2' fluoro-modified a, c, u, g, or other
  misc_feature (2)..(3): Phosphorothioate linkage
  modified_base (3)..(3): 2' O-methyl modified a, c, u, g, or other
  modified_base (4)..(4): 2' O-methyl modified a, c, u, g, or other
  modified_base (5)..(5): 2' fluoro-modified a, c, u, g, or other
  modified_base (6)..(6): 2' O-methyl modified a, c, u, g, or other
  modified_base (7)..(7): 2' O-methyl modified a, c, u, g, or other
  modified_base (8)..(8): 2' O-methyl modified a, c, u, g, or other
  modified_base (9)..(9): 2' O-methyl modified a, c, u, g, or other
  modified_base (10)..(10): 2' fluoro-modified a, c, u, g, or other
  modified_base (11)..(11): 2' O-methyl modified a, c, u, g, or other
  modified_base (12)..(12): 2' fluoro-modified a, c, u, g, or other
  modified_base (13)..(13): 2' O-methyl modified a, c, u, g, or other
  modified_base (14)..(14): 2' fluoro-modified a, c, u, g, or other
  modified_base (15)..(15): 2' O-methyl modified a, c, u, g, or other
  modified_base (16)..(16): 2' fluoro-modified a, c, u, g, or other
  modified_base (17)..(17): 2' O-methyl modified a, c, u, g, or other
  modified_base (18)..(18): 2' fluoro-modified a, c, u, g, or other
  modified_base (19)..(19): 2' O-methyl modified a, c, u, g, or other
  misc_feature (19)..(20): Phosphorothioate linkage
  modified_base (20)..(20): 2' O-methyl modified a, c, u, g, or other
  misc_feature (20)..(21): Phosphorothioate linkage
  modified_base (21)..(21): 2' O-methyl modified a, c, u, g, or other
nnnnnnnnnnnnnnnnnnnnn

SEQ ID NO: 6358 - RNA, 21 nt, Artificial Sequence
  Description of Artificial Sequence: Synthetic oligonucleotide
aaaaguuuaaugucacccauu

SEQ ID NO: 6359 - RNA, 21 nt, Artificial Sequence
  Description of Artificial Sequence: Synthetic oligonucleotide
aacuucuugucagacauaauu

SEQ ID NO: 6360 - RNA, 21 nt, Artificial Sequence
  Description of Artificial Sequence: Synthetic oligonucleotide
uaaugacacaguccuaaaauu

SEQ ID NO: 6361 - RNA, 21 nt, Artificial Sequence
  Description of Artificial Sequence: Synthetic oligonucleotide
guaaugacacaguccuaaauu

SEQ ID NO: 6362 - RNA, 21 nt, Artificial Sequence
  Description of Artificial Sequence: Synthetic oligonucleotide
caaccaggaguguaacauauu

SEQ ID NO: 6363 - RNA, 21 nt, Artificial Sequence
  Description of Artificial Sequence: Synthetic oligonucleotide
ccugaaugguauguggugauu

SEQ ID NO: 6364 - RNA, 21 nt, Artificial Sequence
  Description of Artificial Sequence: Synthetic oligonucleotide
cacaguccuaaauguggcauu

SEQ ID NO: 6365 - RNA, 21 nt, Artificial Sequence
  Description of Artificial Sequence: Synthetic oligonucleotide
caagccgcaguucacguuauu

SEQ ID NO: 6366 - RNA, 21 nt, Artificial Sequence
  Description of Artificial Sequence: Synthetic oligonucleotide
ucuucacgcgugucucugauu

SEQ ID NO: 6367 - RNA, 21 nt, Artificial Sequence
  Description of Artificial Sequence: Synthetic oligonucleotide
acuauugccggaauccugauu

SEQ ID NO: 6368 - RNA, 21 nt, Artificial Sequence
  Description of Artificial Sequence: Synthetic oligonucleotide
auucgacuacugugcccuauu

SEQ ID NO: 6369 - RNA, 21 nt, Artificial Sequence
  Description of Artificial Sequence: Synthetic oligonucleotide
aguuugagaaguguggcaauu

SEQ ID NO: 6370 - RNA, 21 nt, Artificial Sequence
  Description of Artificial Sequence: Synthetic oligonucleotide
augacacaguccuaaaugauu

SEQ ID NO: 6371 - RNA, 21 nt, Artificial Sequence
  Description of Artificial Sequence: Synthetic oligonucleotide
acaaaacuucuugucagaauu

SEQ ID NO: 6372 - RNA, 21 nt, Artificial Sequence
  Description of Artificial Sequence: Synthetic oligonucleotide
cuucuugucagacauaaauuu

SEQ ID NO: 6373 - RNA, 21 nt, Artificial Sequence
  Description of Artificial Sequence: Synthetic oligonucleotide
cuucuugucagacauaaaauu

SEQ ID NO: 6374 - RNA, 21 nt, Artificial Sequence
  Description of Artificial Sequence: Synthetic oligonucleotide
cuucuugucagacauaaaguu

SEQ ID NO: 6375 - RNA, 21 nt, Artificial Sequence
  Description of Artificial Sequence: Synthetic oligonucleotide
gguccuggaaggaauuauauu

SEQ ID NO: 6376 - RNA, 21 nt, Artificial Sequence
  Description of Artificial Sequence: Synthetic oligonucleotide
gguccuggaaggaauuauuuu

SEQ ID NO: 6377 - RNA, 21 nt, Artificial Sequence
  Description of Artificial Sequence: Synthetic oligonucleotide
gacaacuauugccggaauauu

SEQ ID NO: 6378 - RNA, 21 nt, Artificial Sequence
  Description of Artificial Sequence: Synthetic oligonucleotide
ugacacaguccuaaauguauu

SEQ ID NO: 6379 - RNA, 21 nt, Artificial Sequence
  Description of Artificial Sequence: Synthetic oligonucleotide
aguccuaaauguggccuuauu

SEQ ID NO: 6380 - RNA, 21 nt, Artificial Sequence
  Description of Artificial Sequence: Synthetic oligonucleotide
gaguguaacaucaagcacauu

SEQ ID NO: 6381 - RNA, 21 nt, Artificial Sequence
  Description of Artificial Sequence: Synthetic oligonucleotide
guguaacaucaagcaccgauu

SEQ ID NO: 6382 - RNA, 21 nt, Artificial Sequence
  Description of Artificial Sequence: Synthetic oligonucleotide
auuauaauccccaaccgaauu

SEQ ID NO: 6383 - RNA, 21 nt, Artificial Sequence
  Description of Artificial Sequence: Synthetic oligonucleotide
uauaauccccaaccgaguauu

SEQ ID NO: 6384 - RNA, 21 nt, Artificial Sequence
  Description of Artificial Sequence: Synthetic oligonucleotide
acuucuugucagacauaauuu

SEQ ID NO: 6385 - RNA, 21 nt, Artificial Sequence
  Description of Artificial Sequence: Synthetic oligonucleotide
acuucuugucagacauaaauu

SEQ ID NO: 6386 - RNA, 21 nt, Artificial Sequence
  Description of Artificial Sequence: Synthetic oligonucleotide
ucuugucagacauaaagcauu

SEQ ID NO: 6387 - RNA, 21 nt, Artificial Sequence
  Description of Artificial Sequence: Synthetic oligonucleotide
uugucagacauaaagccaauu

SEQ ID NO: 6388 - RNA, 21 nt, Artificial Sequence
  Description of Artificial Sequence: Synthetic oligonucleotide
ugggugacauuaaacuuuuuu

SEQ ID NO: 6389 - RNA, 21 nt, Artificial Sequence
  Description of Artificial Sequence: Synthetic oligonucleotide
uuaugucugacaagaaguuuu

SEQ ID NO: 6390 - RNA, 21 nt, Artificial Sequence
  Description of Artificial Sequence: Synthetic oligonucleotide
uuuuaggacugugucauuauu

SEQ ID NO: 6391 - RNA, 21 nt, Artificial Sequence
  Description of Artificial Sequence: Synthetic oligonucleotide
uuuaggacugugucauuacuu

SEQ ID NO: 6392 - RNA, 21 nt, Artificial Sequence
  Description of Artificial Sequence: Synthetic oligonucleotide
uauguuacacuccugguuguu

SEQ ID NO: 6393 - RNA, 21 nt, Artificial Sequence
  Description of Artificial Sequence: Synthetic oligonucleotide
ucaccacauaccauucagguu

SEQ ID NO: 6394 - RNA, 21 nt, Artificial Sequence
  Description of Artificial Sequence: Synthetic oligonucleotide
ugccacauuuaggacuguguu

SEQ ID NO: 6395 - RNA, 21 nt, Artificial Sequence
  Description of Artificial Sequence: Synthetic oligonucleotide
uaacgugaacugcggcuuguu

SEQ ID NO: 6396 - RNA, 21 nt, Artificial Sequence
  Description of Artificial Sequence: Synthetic oligonucleotide
ucagagacacgcgugaagauu

SEQ ID NO: 6397 - RNA, 21 nt, Artificial Sequence
  Description of Artificial Sequence: Synthetic oligonucleotide
ucaggauuccggcaauaguuu

SEQ ID NO: 6398 - RNA, 21 nt, Artificial Sequence
  Description of Artificial Sequence: Synthetic oligonucleotide
uagggcacaguagucgaauuu

SEQ ID NO: 6399 - RNA, 21 nt, Artificial Sequence
  Description of Artificial Sequence: Synthetic oligonucleotide
uugccacacuucucaaacuuu

SEQ ID NO: 6400 - RNA, 21 nt, Artificial Sequence
  Description of Artificial Sequence: Synthetic oligonucleotide
ucauuuaggacugugucauuu

SEQ ID NO: 6401 - RNA, 21 nt, Artificial Sequence
  Description of Artificial Sequence: Synthetic oligonucleotide
uucugacaagaaguuuuguuu

SEQ ID NO: 6402 - RNA, 21 nt, Artificial Sequence
  Description of Artificial Sequence: Synthetic oligonucleotide
auuuaugucugacaagaaguu

SEQ ID NO: 6403 - RNA, 21 nt, Artificial Sequence
  Description of Artificial Sequence: Synthetic oligonucleotide
uuuuaugucugacaagaaguu

SEQ ID NO: 6404 - RNA, 21 nt, Artificial Sequence
  Description of Artificial Sequence: Synthetic oligonucleotide
cuuuaugucugacaagaaguu

SEQ ID NO: 6405 - RNA, 21 nt, Artificial Sequence
  Description of Artificial Sequence: Synthetic oligonucleotide
uauaauuccuuccaggaccuu

SEQ ID NO: 6406 - RNA, 21 nt, Artificial Sequence
  Description of Artificial Sequence: Synthetic oligonucleotide
aauaauuccuuccaggaccuu

SEQ ID NO: 6407 - RNA, 21 nt, Artificial Sequence
  Description of Artificial Sequence: Synthetic oligonucleotide
uauuccggcaauaguugucuu

SEQ ID NO: 6408 - RNA, 21 nt, Artificial Sequence
  Description of Artificial Sequence: Synthetic oligonucleotide
uacauuuaggacugugucauu

SEQ ID NO: 6409 - RNA, 21 nt, Artificial Sequence
  Description of Artificial Sequence: Synthetic oligonucleotide
uaaggccacauuuaggacuuu

SEQ ID NO: 6410 - RNA, 21 nt, Artificial Sequence
  Description of Artificial Sequence: Synthetic oligonucleotide
ugugcuugauguuacacucuu

SEQ ID NO: 6411 - RNA, 21 nt, Artificial Sequence
  Description of Artificial Sequence: Synthetic oligonucleotide
ucggugcuugauguuacacuu

SEQ ID NO: 6412 - RNA, 21 nt, Artificial Sequence
  Description of Artificial Sequence: Synthetic oligonucleotide
uucgguuggggauuauaauuu

SEQ ID NO: 6413 - RNA, 21 nt, Artificial Sequence
  Description of Artificial Sequence: Synthetic oligonucleotide
uacucgguuggggauuauauu

SEQ ID NO: 6414 - RNA, 21 nt, Artificial Sequence
  Description of Artificial Sequence: Synthetic oligonucleotide
auuaugucugacaagaaguuu

SEQ ID NO: 6415 - RNA, 21 nt, Artificial Sequence
  Description of Artificial Sequence: Synthetic oligonucleotide
uuuaugucugacaagaaguuu

SEQ ID NO: 6416 - RNA, 21 nt, Artificial Sequence
  Description of Artificial Sequence: Synthetic oligonucleotide
ugcuuuaugucugacaagauu

SEQ ID NO: 6417 - RNA, 21 nt, Artificial Sequence
  Description of Artificial Sequence: Synthetic oligonucleotide
uuggcuuuaugucugacaauu

SEQ ID NO: 6418 - RNA, 19 nt, Artificial Sequence
  Description of Artificial Sequence: Synthetic oligonucleotide
cuucuugucagacauaaaa

SEQ ID NO: 6419 - RNA, 19 nt, Artificial Sequence
  Description of Artificial Sequence: Synthetic oligonucleotide
aaaaguuuaaugucaccca

SEQ ID NO: 6420 - RNA, 19 nt, Artificial Sequence
  Description of Artificial Sequence: Synthetic oligonucleotide
aacuucuugucagacauaa

SEQ ID NO: 6421 - RNA, 19 nt, Artificial Sequence
  Description of Artificial Sequence: Synthetic oligonucleotide
uaaugacacaguccuaaaa

SEQ ID NO: 6422 - RNA, 19 nt, Artificial Sequence
  Description of Artificial Sequence: Synthetic oligonucleotide
guaaugacacaguccuaaa

SEQ ID NO: 6423 - RNA, 19 nt, Artificial Sequence
  Description of Artificial Sequence: Synthetic oligonucleotide
gguccuggaaggaauuaua

SEQ ID NO: 6424 - RNA, 19 nt, Artificial Sequence
  Description of Artificial Sequence: Synthetic oligonucleotide
caaccaggaguguaacaua

SEQ ID NO: 6425 - RNA, 19 nt, Artificial Sequence
  Description of Artificial Sequence: Synthetic oligonucleotide
ccugaaugguaugugguga

SEQ ID NO: 6426 - RNA, 19 nt, Artificial Sequence
  Description of Artificial Sequence: Synthetic oligonucleotide
cacaguccuaaauguggca

SEQ ID NO: 6427 - RNA, 19 nt, Artificial Sequence
  Description of Artificial Sequence: Synthetic oligonucleotide
caagccgcaguucacguua

SEQ ID NO: 6428 - RNA, 19 nt, Artificial Sequence
  Description of Artificial Sequence: Synthetic oligonucleotide
ucuucacgcgugucucuga

SEQ ID NO: 6429 - RNA, 19 nt, Artificial Sequence
  Description of Artificial Sequence: Synthetic oligonucleotide
acuauugccggaauccuga

SEQ ID NO: 6430 - RNA, 19 nt, Artificial Sequence
  Description of Artificial Sequence: Synthetic oligonucleotide
auucgacuacugugcccua

SEQ ID NO: 6431 - RNA, 19 nt, Artificial Sequence
  Description of Artificial Sequence: Synthetic oligonucleotide
aguuugagaaguguggcaa

SEQ ID NO: 6432 - RNA, 19 nt, Artificial Sequence
  Description of Artificial Sequence: Synthetic oligonucleotide
augacacaguccuaaauga

SEQ ID NO: 6433 - RNA, 19 nt, Artificial Sequence
  Description of Artificial Sequence: Synthetic oligonucleotide
acaaaacuucuugucagaa

SEQ ID NO: 6434 - RNA, 19 nt, Artificial Sequence
  Description of Artificial Sequence: Synthetic oligonucleotide
acuucuugucagacauaaa

SEQ ID NO: 6435 - RNA, 19 nt, Artificial Sequence
  Description of Artificial Sequence: Synthetic oligonucleotide
gguccuggaaggaauuaua

SEQ ID NO: 6436 - RNA, 19 nt, Artificial Sequence
  Description of Artificial Sequence: Synthetic oligonucleotide
aacuucuugucagacauaa

SEQ ID NO: 6437 - RNA, 19 nt, Artificial Sequence
  Description of Artificial Sequence: Synthetic oligonucleotide
cuucuugucagacauaaaa

SEQ ID NO: 6438 - RNA, 19 nt, Artificial Sequence
  Description of Artificial Sequence: Synthetic oligonucleotide
caaccaggaguguaacaua

SEQ ID NO: 6439 - RNA, 19 nt, Artificial Sequence
  Description of Artificial Sequence: Synthetic oligonucleotide
cuucuugucagacauaaau

SEQ ID NO: 6440 - RNA, 19 nt, Artificial Sequence
  Description of Artificial Sequence: Synthetic oligonucleotide
cuucuugucagacauaaaa

SEQ ID NO: 6441 - RNA, 19 nt, Artificial Sequence
  Description of Artificial Sequence: Synthetic oligonucleotide
cuucuugucagacauaaaa

SEQ ID NO: 6442 - RNA, 19 nt, Artificial Sequence
  Description of Artificial Sequence: Synthetic oligonucleotide
cuucuugucagacauaaaa

SEQ ID NO: 6443 - RNA, 19 nt, Artificial Sequence
  Description of Artificial Sequence: Synthetic oligonucleotide
cuucuugucagacauaaag

SEQ ID NO: 6444 - RNA, 19 nt, Artificial Sequence
  Description of Artificial Sequence: Synthetic oligonucleotide
gguccuggaaggaauuaua

SEQ ID NO: 6445 - RNA, 19 nt, Artificial Sequence
  Description of Artificial Sequence: Synthetic oligonucleotide
gguccuggaaggaauuaua

SEQ ID NO: 6446 - RNA, 19 nt, Artificial Sequence
  Description of Artificial Sequence: Synthetic oligonucleotide
gguccuggaaggaauuaua

SEQ ID NO: 6447 - RNA, 19 nt, Artificial Sequence
  Description of Artificial Sequence: Synthetic oligonucleotide
gguccuggaaggaauuaua

SEQ ID NO: 6448 - RNA, 19 nt, Artificial Sequence
  Description of Artificial Sequence: Synthetic oligonucleotide
gguccuggaaggaauuaua

SEQ ID NO: 6449 - RNA, 19 nt, Artificial Sequence
  Description of Artificial Sequence: Synthetic oligonucleotide
gguccuggaaggaauuauu

SEQ ID NO: 6450 - RNA, 19 nt, Artificial Sequence
  Description of Artificial Sequence: Synthetic oligonucleotide
gacaacuauugccggaaua

SEQ ID NO: 6451 - RNA, 19 nt, Artificial Sequence
  Description of Artificial Sequence: Synthetic oligonucleotide
ugacacaguccuaaaugua

SEQ ID NO: 6452 - RNA, 19 nt, Artificial Sequence
  Description of Artificial Sequence: Synthetic oligonucleotide
aguccuaaauguggccuua

SEQ ID NO: 6453 - RNA, 19 nt, Artificial Sequence
  Description of Artificial Sequence: Synthetic oligonucleotide
gaguguaacaucaagcaca

SEQ ID NO: 6454 - RNA, 19 nt, Artificial Sequence
  Description of Artificial Sequence: Synthetic oligonucleotide
guguaacaucaagcaccga

SEQ ID NO: 6455 - RNA, 19 nt, Artificial Sequence
  Description of Artificial Sequence: Synthetic oligonucleotide
auuauaauccccaaccgaa

SEQ ID NO: 6456 - RNA, 19 nt, Artificial Sequence
  Description of Artificial Sequence: Synthetic oligonucleotide
uauaauccccaaccgagua

SEQ ID NO: 6457 - RNA, 19 nt, Artificial Sequence
  Description of Artificial Sequence: Synthetic oligonucleotide
ucuugucagacauaaagca

SEQ ID NO: 6458 - RNA, 19 nt, Artificial Sequence
  Description of Artificial Sequence: Synthetic oligonucleotide
uugucagacauaaagccaa

SEQ ID NO: 6459 - RNA, 19 nt, Artificial Sequence
  Description of Artificial Sequence: Synthetic oligonucleotide
acuucuugucagacauaaa

SEQ ID NO: 6460 - RNA, 19 nt, Artificial Sequence
  Description of Artificial Sequence: Synthetic oligonucleotide
acuucuugucagacauaaa

SEQ ID NO: 6461 - RNA, 19 nt, Artificial Sequence
  Description of Artificial Sequence: Synthetic oligonucleotide
acuucuugucagacauaaa

SEQ ID NO: 6462 - RNA, 19 nt, Artificial Sequence
  Description of Artificial Sequence: Synthetic oligonucleotide
acuucuugucagacauaau

SEQ ID NO: 6463 - RNA, 19 nt, Artificial Sequence
  Description of Artificial Sequence: Synthetic oligonucleotide
acuucuugucagacauaaa

SEQ ID NO: 6464 - RNA, 19 nt, Artificial Sequence
  Description of Artificial Sequence: Synthetic oligonucleotide
acuucuugucagacauaaa

SEQ ID NO: 6465 - RNA, 19 nt, Artificial Sequence
  Description of Artificial Sequence: Synthetic oligonucleotide
acuucuugucagacauaaa

SEQ ID NO: 6466 - RNA, 19 nt, Artificial Sequence
  Description of Artificial Sequence: Synthetic oligonucleotide
acuucuugucagacauaaa

SEQ ID NO: 6467 - RNA, 19 nt, Artificial Sequence
  Description of Artificial Sequence: Synthetic oligonucleotide
ucuugucagacauaaagca

SEQ ID NO: 6468 - RNA, 19 nt, Artificial Sequence
  Description of Artificial Sequence: Synthetic oligonucleotide
ucuugucagacauaaagca

SEQ ID NO: 6469 - RNA, 19 nt, Artificial Sequence
  Description of Artificial Sequence: Synthetic oligonucleotide
ucuugucagacauaaagca

SEQ ID NO: 6470 - RNA, 19 nt, Artificial Sequence
  Description of Artificial Sequence: Synthetic oligonucleotide
ucuugucagacauaaagca

SEQ ID NO: 6471 - RNA, 19 nt, Artificial Sequence
  Description of Artificial Sequence: Synthetic oligonucleotide
uugucagacauaaagccaa

SEQ ID NO: 6472 - RNA, 19 nt, Artificial Sequence
  Description of Artificial Sequence: Synthetic oligonucleotide
uugucagacauaaagccaa

SEQ ID NO: 6473 - RNA, 19 nt, Artificial Sequence
  Description of Artificial Sequence: Synthetic oligonucleotide
uugucagacauaaagccaa

SEQ ID NO: 6474 - RNA, 19 nt, Artificial Sequence
  Description of Artificial Sequence: Synthetic oligonucleotide
uugucagacauaaagccaa

SEQ ID NO: 6475 - RNA, 19 nt, Artificial Sequence
  Description of Artificial Sequence: Synthetic oligonucleotide
uugucagacauaaagccaa

SEQ ID NO: 6476 - RNA, 19 nt, Artificial Sequence
  Description of Artificial Sequence: Synthetic oligonucleotide
uugucagacauaaagccaa

SEQ ID NO: 6477 - RNA, 19 nt, Artificial Sequence
  Description of Artificial Sequence: Synthetic oligonucleotide
uuuuaugucugacaagaag

SEQ ID NO: 6478 - RNA, 19 nt, Artificial Sequence
  Description of Artificial Sequence: Synthetic oligonucleotide
ugggugacauuaaacuuuu

SEQ ID NO: 6479 - RNA, 19 nt, Artificial Sequence
  Description of Artificial Sequence: Synthetic oligonucleotide
uuaugucugacaagaaguu

SEQ ID NO: 6480 - RNA, 19 nt, Artificial Sequence
  Description of Artificial Sequence: Synthetic oligonucleotide
uuuuaggacugugucauua

SEQ ID NO: 6481 - RNA, 19 nt, Artificial Sequence
  Description of Artificial Sequence: Synthetic oligonucleotide
uuuaggacugugucauuac

SEQ ID NO: 6482 - RNA, 19 nt, Artificial Sequence
  Description of Artificial Sequence: Synthetic oligonucleotide
uauaauuccuuccaggacc

SEQ ID NO: 6483 - RNA, 19 nt, Artificial Sequence
  Description of Artificial Sequence: Synthetic oligonucleotide
uauguuacacuccugguug

SEQ ID NO: 6484 - RNA, 19 nt, Artificial Sequence
  Description of Artificial Sequence: Synthetic oligonucleotide
ucaccacauaccauucagg

SEQ ID NO: 6485 - RNA, 19 nt, Artificial Sequence
  Description of Artificial Sequence: Synthetic oligonucleotide
ugccacauuuaggacugug

SEQ ID NO: 6486 - RNA, 19 nt, Artificial Sequence
  Description of Artificial Sequence: Synthetic oligonucleotide
uaacgugaacugcggcuug

SEQ ID NO: 6487 - RNA, 19 nt, Artificial Sequence
  Description of Artificial Sequence: Synthetic oligonucleotide
ucagagacacgcgugaaga

SEQ ID NO: 6488 - RNA, 19 nt, Artificial Sequence
  Description of Artificial Sequence: Synthetic oligonucleotide
ucaggauuccggcaauagu

SEQ ID NO: 6489 - RNA, 19 nt, Artificial Sequence
  Description of Artificial Sequence: Synthetic oligonucleotide
uagggcacaguagucgaau

SEQ ID NO: 6490 - RNA, 19 nt, Artificial Sequence
  Description of Artificial Sequence: Synthetic oligonucleotide
uugccacacuucucaaacu

SEQ ID NO: 6491 - RNA, 19 nt, Artificial Sequence
  Description of Artificial Sequence: Synthetic oligonucleotide
ucauuuaggacugugucau

SEQ ID NO: 6492 - RNA, 19 nt, Artificial Sequence
  Description of Artificial Sequence: Synthetic oligonucleotide
uucugacaagaaguuuugu

SEQ ID NO: 6493 - RNA, 19 nt, Artificial Sequence
  Description of Artificial Sequence: Synthetic oligonucleotide
uuuaugucugacaagaagu

SEQ ID NO: 6494 - RNA, 19 nt, Artificial Sequence
  Description of Artificial Sequence: Synthetic oligonucleotide
uauaauuccuuccaggacc

SEQ ID NO: 6495 - RNA, 19 nt, Artificial Sequence
  Description of Artificial Sequence: Synthetic oligonucleotide
uuaugucugacaagaaguu

SEQ ID NO: 6496 - RNA, 19 nt, Artificial Sequence
  Description of Artificial Sequence: Synthetic oligonucleotide
uuuuaugucugacaagaag

SEQ ID NO: 6497 - RNA, 19 nt, Artificial Sequence
  Description of Artificial Sequence: Synthetic oligonucleotide
uauguuacacuccugguug

SEQ ID NO: 6498 - RNA, 19 nt, Artificial Sequence
  Description of Artificial Sequence: Synthetic oligonucleotide
auuuaugucugacaagaag

SEQ ID NO: 6499 - RNA, 19 nt, Artificial Sequence
  Description of Artificial Sequence: Synthetic oligonucleotide
uuuuaugucugacaagaag

SEQ ID NO: 6500 - RNA, 19 nt, Artificial Sequence
  Description of Artificial Sequence: Synthetic oligonucleotide
uuuuaugucugacaagaag

SEQ ID NO: 6501 - RNA, 19 nt, Artificial Sequence
  Description of Artificial Sequence: Synthetic oligonucleotide
uuuuaugucugacaagaag

SEQ ID NO: 6502 - RNA, 19 nt, Artificial Sequence
  Description of Artificial Sequence: Synthetic oligonucleotide
cuuuaugucugacaagaag

SEQ ID NO: 6503 - RNA, 19 nt, Artificial Sequence
  Description of Artificial Sequence: Synthetic oligonucleotide
uauaauuccuuccaggacc

SEQ ID NO: 6504 - RNA, 19 nt, Artificial Sequence
  Description of Artificial Sequence: Synthetic oligonucleotide
uauaauuccuuccaggacc

SEQ ID NO: 6505 - RNA, 19 nt, Artificial Sequence
  Description of Artificial Sequence: Synthetic oligonucleotide
uauaauuccuuccaggacc

SEQ ID NO: 6506 - RNA, 19 nt, Artificial Sequence
  Description of Artificial Sequence: Synthetic oligonucleotide
uauaauuccuuccaggacc

SEQ ID NO: 6507 - RNA, 19 nt, Artificial Sequence
  Description of Artificial Sequence: Synthetic oligonucleotide
uauaauuccuuccaggacc

SEQ ID NO: 6508 - RNA, 19 nt, Artificial Sequence
  Description of Artificial Sequence: Synthetic oligonucleotide
aauaauuccuuccaggacc

SEQ ID NO: 6509 - RNA, 19 nt, Artificial Sequence
  Description of Artificial Sequence: Synthetic oligonucleotide
uauuccggcaauaguuguc

SEQ ID NO: 6510 - RNA, 19 nt, Artificial Sequence
  Description of Artificial Sequence: Synthetic oligonucleotide
uacauuuaggacuguguca

SEQ ID NO: 6511 - RNA, 19 nt, Artificial Sequence
  Description of Artificial Sequence: Synthetic oligonucleotide
uaaggccacauuuaggacu

SEQ ID NO: 6512 - RNA, 19 nt, Artificial Sequence
  Description of Artificial Sequence: Synthetic oligonucleotide
ugugcuugauguuacacuc

SEQ ID NO: 6513 - RNA, 19 nt, Artificial Sequence
  Description of Artificial Sequence: Synthetic oligonucleotide
ucggugcuugauguuacac

SEQ ID NO: 6514 - RNA, 19 nt, Artificial Sequence
  Description of Artificial Sequence: Synthetic oligonucleotide
uucgguuggggauuauaau

SEQ ID NO: 6515 - RNA, 19 nt, Artificial Sequence
  Description of Artificial Sequence: Synthetic oligonucleotide
uacucgguuggggauuaua

SEQ ID NO: 6516 - RNA, 19 nt, Artificial Sequence
  Description of Artificial Sequence: Synthetic oligonucleotide
ugcuuuaugucugacaaga

SEQ ID NO: 6517 - RNA, 19 nt, Artificial Sequence
  Description of Artificial Sequence: Synthetic oligonucleotide
uuggcuuuaugucugacaa

SEQ ID NO: 6518 - RNA, 19 nt, Artificial Sequence
  Description of Artificial Sequence: Synthetic oligonucleotide
uuuaugucugacaagaagu

SEQ ID NO: 6519 - RNA, 19 nt, Artificial Sequence
  Description of Artificial Sequence: Synthetic oligonucleotide
uuuaugucugacaagaagu

SEQ ID NO: 6520 - RNA, 19 nt, Artificial Sequence
  Description of Artificial Sequence: Synthetic oligonucleotide
uuuaugucugacaagaagu

SEQ ID NO: 6521 - RNA, 19 nt, Artificial Sequence
  Description of Artificial Sequence: Synthetic oligonucleotide
auuaugucugacaagaagu

SEQ ID NO: 6522 - RNA, 19 nt, Artificial Sequence
  Description of Artificial Sequence: Synthetic oligonucleotide
uuuaugucugacaagaagu

SEQ ID NO: 6523 - RNA, 19 nt, Artificial Sequence
  Description of Artificial Sequence: Synthetic oligonucleotide
uuuaugucugacaagaagu

SEQ ID NO: 6524 - RNA, 19 nt, Artificial Sequence
  Description of Artificial Sequence: Synthetic oligonucleotide
uuuaugucugacaagaagu

SEQ ID NO: 6525 - RNA, 19 nt, Artificial Sequence
  Description of Artificial Sequence: Synthetic oligonucleotide
uuuaugucugacaagaagu

SEQ ID NO: 6526 - RNA, 19 nt, Artificial Sequence
  Description of Artificial Sequence: Synthetic oligonucleotide
ugcuuuaugucugacaaga

SEQ ID NO: 6527 - RNA, 19 nt, Artificial Sequence
  Description of Artificial Sequence: Synthetic oligonucleotide
ugcuuuaugucugacaaga

SEQ ID NO: 6528 - RNA, 19 nt, Artificial Sequence
  Description of Artificial Sequence: Synthetic oligonucleotide
ugcuuuaugucugacaaga

SEQ ID NO: 6529 - RNA, 19 nt, Artificial Sequence
  Description of Artificial Sequence: Synthetic oligonucleotide
ugcuuuaugucugacaaga

SEQ ID NO: 6530 - RNA, 19 nt, Artificial Sequence
  Description of Artificial Sequence: Synthetic oligonucleotide
uuggcuuuaugucugacaa

SEQ ID NO: 6531 - RNA, 19 nt, Artificial Sequence
  Description of Artificial Sequence: Synthetic oligonucleotide
uuggcuuuaugucugacaa

SEQ ID NO: 6532 - RNA, 19 nt, Artificial Sequence
  Description of Artificial Sequence: Synthetic oligonucleotide
uuggcuuuaugucugacaa

SEQ ID NO: 6533 - RNA, 19 nt, Artificial Sequence
  Description of Artificial Sequence: Synthetic oligonucleotide
uuggcuuuaugucugacaa

SEQ ID NO: 6534 - RNA, 19 nt, Artificial Sequence
  Description of Artificial Sequence: Synthetic oligonucleotide
uuggcuuuaugucugacaa

SEQ ID NO: 6535 - RNA, 19 nt, Artificial Sequence
  Description of Artificial Sequence: Synthetic oligonucleotide
uuggcuuuaugucugacaa

What is claimed is:

1. A composition comprising an oligonucleotide that targets MST1 and when administered to a subject in an effective amount increases a lung function measurement.

2. The composition of claim 1, wherein the lung function measurement comprises a forced expiratory volume in 1 second (FEV1) measurement, a forced expiratory volume in 1 second percent predicted (FEV1pp) measurement, a forced vital capacity (FVC) measurement, a FEV1/FVC ratio measurement, a forced expiratory volume, or a peak expiratory flow measurement.

3. The composition of claim 1, wherein the lung function measurement is increased by about 10% or more, as compared to prior to administration.

4. A composition comprising an oligonucleotide that targets MST1 and when administered to a subject in an effective amount decreases a leukocyte measurement.

5. The composition of claim 4, wherein the leukocyte measurement comprises a lung leukocyte measurement.

6. The composition of claim 4, wherein the leukocyte measurement comprises a circulating leukocyte measurement.

7. The composition of claim 4, wherein the leukocyte measurement comprises a neutrophil measurement, eosinophil measurement, basophil measurement, monocyte measurement, or lymphocyte measurement, or a combination thereof.

8. The composition of claim 4, wherein the leukocyte measurement is decreased by about 10% or more, as compared to prior to administration.

9. A composition comprising an oligonucleotide that targets MST1 and when administered to a subject in an effective amount decreases a chronic obstructive pulmonary disease (COPD) or asthma exacerbation measurement.

10. The composition of claim 9, wherein the COPD or asthma exacerbation measurement is decreased by about 10% or more, as compared to prior to administration.

11. The composition of any one of claims 1, 4 or 9, wherein the oligonucleotide comprises a modified internucleoside linkage.

12. The composition of claim 11, wherein the modified internucleoside linkage comprises alkylphosphonate, phosphorothioate, methylphosphonate, phosphorodithioate, alkylphosphonothioate, phosphoramidate, carbamate, carbonate, phosphate triester, acetamidate, or carboxymethyl ester, or a combination thereof.

13. The composition of claim 11, wherein the modified internucleoside linkage comprises one or more phosphorothioate linkages.

14. The composition of any one of claims 1, 4 or 9, wherein the oligonucleotide comprises 1, 2, 3, 4, 5, 6, 7, 8, 9, 10, 11, 12, 13, 14, 15, 16, 17, 18, 19, or 20 modified internucleoside linkages.

15. The composition of any one of claims 1, 4 or 9, wherein the oligonucleotide comprises a modified nucleoside.

16. The composition of claim 15, wherein the modified nucleoside comprises a locked nucleic acid (LNA), hexitol nucleic acid (HLA), cyclohexene nucleic acid (CeNA), 2′-methoxyethyl, 2′-O-alkyl, 2′-O-allyl, 2′-O-allyl, 2′-fluoro, or 2′-deoxy, or a combination thereof.

17. The composition of claim 15, wherein the modified nucleoside comprises a LNA.

18. The composition of claim 15, wherein the modified nucleoside comprises a 2′,4′ constrained ethyl nucleic acid.

19. The composition of claim 15, wherein the modified nucleoside comprises a 2′-O-methyl nucleoside, 2′-deoxyfluoro nucleoside, 2′-O—N-methylacetamido (2′-O-NMA) nucleoside, a 2′-O-dimethylaminoethoxyethyl (2′-O-DMAEOE) nucleoside, 2′-O-aminopropyl (2′-O-AP)nucleoside, or 2′-ara-F, or a combination thereof.

20. The composition of claim 15, wherein the modified nucleoside comprises one or more 2′fluoro modified nucleosides.

21. The composition of claim 15, wherein the modified nucleoside comprises a 2′ O-alkyl modified nucleoside.

22. The composition of any one of claims 1, 4 or 9, wherein the oligonucleotide comprises 1, 2, 3, 4, 5, 6, 7, 8, 9, 10, 11, 12, 13, 14, 15, 16, 17, 18, 19, 20, or 21 modified nucleosides.

23. The composition of any one of claims 1, 4 or 9, wherein the oligonucleotide comprises a lipid attached at a 3′ or 5′ terminus of the oligonucleotide.

24. The composition of claim 23, wherein the lipid comprises cholesterol, myristoyl, palmitoyl, stearoyl, lithocholoyl, docosanoyl, docosahexaenoyl, myristyl, palmityl stearyl, or α-tocopherol, or a combination thereof.

25. The composition of any one of claims 1, 4 or 9, wherein the oligonucleotide comprises a sugar moiety attached at a 3′ or 5′ terminus of the oligonucleotide.

26. The composition of claim 25, wherein the sugar comprises N-acetylgalactosamine (GalNAc), N-acetylglucosamine (GlcNAc), or mannose.

27. The composition of any one of claims 1, 4 or 9, wherein the oligonucleotide comprises an integrin targeting ligand attached at a 3′ or 5′ terminus of the oligonucleotide.

28. The composition of claim 27, wherein the integrin comprises integrin alpha-v-beta-6.

29. The composition of claim 27, wherein the integrin targeting ligand comprises an arginine-glycine-aspartic acid (RGD) peptide.

30. The composition of any one of claims 1, 4 or 9, wherein the oligonucleotide comprises a small interfering RNA (siRNA) comprising a sense strand and an antisense strand.

31. The composition of claim 30, wherein the sense strand is 12-30 nucleosides in length.

32. The composition of claim 30, wherein the antisense strand is 12-30 nucleosides in length.

33. A composition comprising an oligonucleotide that inhibits the expression of MST1, wherein the oligonucleotide comprises an siRNA comprising a sense strand and an antisense strand, each strand is independently about 12-30 nucleosides in length, and at least one of the sense strand and the antisense strand comprises a nucleoside sequence comprising about 12-30 contiguous nucleosides of SEQ ID NO: 6185.

34. The composition of any one of claims 1, 4, 9 or 33, wherein any one of the following is true with regard to the sense strand:
all purines comprise 2′ fluoro modified purines, and all pyrimidines comprise a mixture of 2′ fluoro and 2′ methyl modified pyrimidines;
all purines comprise 2′ methyl modified purines, and all pyrimidines comprise a mixture of 2′ fluoro and 2′ methyl modified pyrimidines;
all purines comprise 2′ fluoro modified purines, and all pyrimidines comprise 2′ methyl modified pyrimidines;
all pyrimidines comprise 2′ fluoro modified pyrimidines, and all purines comprise a mixture of 2′ fluoro and 2′ methyl modified purines;
all pyrimidines comprise 2′ methyl modified pyrimidines, and all purines comprise a mixture of 2′ fluoro and 2′ methyl modified purines; or
all pyrimidines comprise 2′ fluoro modified pyrimidines, and all purines comprise 2′ methyl modified purines.

35. The composition of claim 30, wherein any one of the following is true with regard to the antisense strand:
all purines comprise 2′ fluoro modified purines, and all pyrimidines comprise a mixture of 2′ fluoro and 2′ methyl modified pyrimidines;
all purines comprise 2′ methyl modified purines, and all pyrimidines comprise a mixture of 2′ fluoro and 2′ methyl modified pyrimidines;
all purines comprise 2′ methyl modified purines, and all pyrimidines comprise 2′ fluoro modified pyrimidines;
all pyrimidines comprise 2′ fluoro modified pyrimidines, and all purines comprise a mixture of 2′ fluoro and 2′ methyl modified purines;
all pyrimidines comprise 2′ methyl modified pyrimidines, and all purines comprise a mixture of 2′ fluoro and 2′ methyl modified purines; or
all pyrimidines comprise 2′ methyl modified pyrimidines, and all purines comprise 2′ fluoro modified purines.

36. The composition of any one of claims 1, 4, or 9, wherein the oligonucleotide comprises an antisense oligonucleotide (ASO).

37. The composition of claim 36, wherein the ASO is 12-30 nucleosides in length.

38. A composition comprising an oligonucleotide that inhibits the expression of MST1, wherein the oligonucleotide comprises an ASO about 12-30 nucleosides in length and a nucleoside sequence complementary to about 12-30 contiguous nucleosides of SEQ ID NO: 6185.

39. The composition of any one of claims 1, 4, 9, 33 or 38, further comprising a pharmaceutically acceptable carrier.

40. A method of treating a subject having a lung disorder, comprising administering an effective amount of the composition of claim 39 to the subject.

41. The method of claim 40, wherein the lung disorder comprises COPD, acute exacerbation of COPD, emphysema, chronic bronchitis, asthma, status asthmaticus, asthma-COPD overlap syndrome (ACOS), cough, lung cancer, interstitial lung disease, or pulmonary fibrosis.
